(19) United States
(12) Patent Application Publication
(10) Pub. No.: US 2023/0265437 A1
(43) Pub. Date: Aug. 24, 2023

(54) RNAi Agents for Inhibiting Expression of Matrix Metalloproteinase 7 (MMP7), Compositions Thereof, and Methods of Use

(71) Applicant: Arrowhead Pharmaceuticals, Inc., Pasadena, CA (US)

(72) Inventors: Anthony Nicholas, Oregon, WI (US); Tao Pei, Middleton, WI (US); Erik W. Bush, Verona, WI (US); Tingting Yuan, Madison, WI (US)

(21) Appl. No.: 18/048,577

(22) Filed: Oct. 21, 2022

Related U.S. Application Data
(60) Provisional application No. 63/345,654, filed on May 25, 2022.
(60) Provisional application No. 63/308,289, filed on Feb. 9, 2022.
(60) Provisional application No. 63/270,849, filed on Oct. 22, 2021.

(51) Int. Cl. C12N 15/113; A61P 11/00

(52) U.S. Cl. CPC C12N 15/1137; A61P 11/00; C12N 2310/14; C12N 2310/11; C12N 2310/32

(57) ABSTRACT

Described are RNAi agents, compositions that include RNAi agents, and methods for inhibition of a matrix metallopeptidase 7 (MMP7) gene. The MMP7 RNAi agents and RNAi agent conjugates disclosed herein inhibit the expression of an MMP7 gene. Pharmaceutical compositions that include one or more MMP7 RNAi agents, optionally with one or more additional therapeutics, are also described. Delivery of the described MMP7 RNAi agents to pulmonary cells, in vivo, provides for inhibition of MMP7 gene expression, which can provide a therapeutic benefit to subjects, including human subjects, for the treatment of various diseases including pulmonary inflammation diseases such as idiopathic pulmonary fibrosis (IPF).

### CROSS REFERENCE TO RELATED APPLICATIONS

[0001] This application claims priority to U.S. Provisional Patent Application Ser. No. 63/270,849, filed on 22 Oct. 2021, U.S. Provisional Patent Application Ser. No. 63/308,289, filed on 9 Feb. 2022, and U.S. Provisional Patent Application Ser. No. 63/345,654, filed on 25 May 2022, the contents of each of which are incorporated herein by reference in their entirety.

### SEQUENCE LISTING

[0002] This application contains a Sequence Listing which has been submitted in ASCII format and is hereby incorporated by reference in its entirety. The ASCII copy is named 30673_US_SequenceListing.xml and is 3,575 kb in size.

### FIELD OF THE INVENTION

[0003] The present disclosure relates to RNA interference (RNAi) agents, e.g., double stranded RNAi agents, for inhibition of Matrix Metalloproteinase 7 (“MMP7” or “Matrilysin”) gene expression, compositions that include MMP7 RNAi agents, and methods of use thereof.

### BACKGROUND

[0004] Matrix Metalloproteinase 7 (“MMP7” or “Matrilysin”) is the smallest (28 kDa) member of the metalloproteinase (MMP) family of 24 related secreted zinc-dependent endopeptidases with diverse substrates and functions, being able to degrade components of the extracellular matrix (for example, elastin, proteoglycans, type IV collagen, fibronectin, entactin/nidogen, and the core protein of proteoglycans) as well as cleaving and modulating the activity non-extracellular matrix substrates like cytokines. (Fujishima, Shiomi et al., Arch Pathol Lab Med 134(8): 1136-1142 (2010); Craig, Zhang et al., Am J Respir Cell Mol Biol 53(5): 585-600 (2015)). These functional roles in extracellular matrix remodeling and regulation of cytokine signaling have linked members of the MMP family to common pathogenic mechanisms contributing to cancer, chronic inflammation, and fibrosis. Despite their attractiveness as drug targets, however, the development of highly selective small molecule MMP inhibitors has been challenging due to the shared structural similarity of the zinc-dependent catalytic domain among family members (Vandenbroucke and Libert, Nat Rev Drug Discov 13(12): 904-927 (2014); Fields, Cells 8(9) (2019)).

[0005] MMP7 is constitutively expressed and secreted by epithelial cells throughout the body (including the skin, lung, and glandular epithelia of the liver, intestine, pancreas, salivary gland, and reproductive tract), where it plays a role in epithelial repair (Pilcher, Wang et al., Ann N Y Acad Sci 878:12-24 (1999)). Increased MMP7 expression has been linked to pathogenic fibrosis of the lung (Rosas, Richards et al., PLoS Med 5(4): e93 (2008)), liver (Hung, Chang et al., Hepatology 50(4): 1184-1193 (2009); Roeb, Matrix Biol 68-69: 463-473 (2018); Nomden, Beljaars et al., Front Med (Lausanne) 7:617261 (2020); Irvine, Okano et al., Sci Rep 11(1):2858 (2021)), and kidney (Ke, Fan et al., Front Physiol 8:21 (2017); Zhang, Ren et al., Kidney Blood Press Res 42(3): 541-552 (2017); Tan, Li et al., JCI Insight 4(24) (2019)). MMP7 enzyme levels have been linked to pathogenic fibrosis via multiple potential mechanisms including promotion of epithelial-mesenchymal transition (EMT), extracellular matrix degradation, aberrant matrix repair, and tissue remodeling. MMP7 promotes fibrosis by cleaving E-cadherin to activate epithelial cells and proteolytically activating heparin-binding epidermal growth factor precursor (pro-HB-EGF) to release active HB-EGF, which promotes aberrant epithelial migration and human lung fibroblast proliferation (Zhang, Rice et al., Am J Respir Cell Mol Biol 24(2):123-131 (2001); McGuire, Li et al., Am J Pathol 162(6):1831-1843 (2003)). MMP7 is also known to promote fibroblast survival and resistance to apoptosis via cleavage of osteopontin and mFasL pathways (Agnihotri, Crawford et al., J Biol Chem 276(30):28261-28267 (2001); Mummler, Burgy et al., FASEB J 32(2):703-716 (2018); Nareznoi, Konikov-Rozenman et al., Cells 9(2) (2020)).

[0006] One specific type of fibrosis is idiopathic pulmonary fibrosis (IPF), a chronic lung disease that is often fatal, and for which the clinical course and rate of disease progression are relatively unpredictable (Id.). In patients with IPF, MMP7 expression is known to increase in peripheral blood, bronchoalveolar lavage fluid, and lung tissue (Zuo, Kaminski et al., Proc Natl Acad Sci USA 99(9): 6292-6297 (2002)). Serum MMP7 expression is a well validated serum biomarker for IPF, which correlates with IPF severity and progression (Song, Do et al., Chest 143(5):1422-1429 (2013); Tzouvelekis, Herazo-Maya et al., Respirology 22(3):486-493 (2017)). Consistent with its known mechanism, MMP7 modulates multiple pathways contributing to aberrant epithelial cell, fibroblast, and immune cell function in IPF. Significantly, MMP7 knockout mice are protected against bleomycin-mediated lung injury (a standard rodent model of IPF), demonstrating reduced pulmonary inflammation, fibrosis, and mortality, and thus suggesting a causative role for MMP7 in IPF (Craig, Zhang et al., Am J Respir Cell Mol Biol 53(5):585-600 (2015)).

[0007] Genome-Wide Association Studies (GWAS) have shown that gain of function MMP7 genetic variant rs11568818AA linked to IPF risk (Richards, Park et al., Am J Physiol Lung Cell Mol Physiol 302(8):L746-754 (2012)). Further, in such GWAS studies it is described that MMP7 genetic variants are associated with multiple cancer diseases and sclerosis (Moreno-Ortiz, Gutierrez-Angulo et al., Genet Mol Res 13(2):3537-3544 (2014); Fu, Chien et al., Anticancer Res 40(2):695-702 (2020)).

### SUMMARY

[0008] There exists a need for novel RNA interference (RNAi) agents (termed RNAi agents, RNAi triggers, or triggers), e.g., double stranded RNAi agents, that are able to selectively and efficiently inhibit the expression of a MMP7 gene, including for use as a therapeutic or medicament. Further, there exists a need for compositions of novel MMP7-specific RNAi agents for the treatment of diseases or disorders associated with pathological inflammation (such as IPF) and/or disorders that can be mediated at least in part by a reduction in MMP7 gene expression.

[0009] The nucleotide sequences and chemical modifications of the MMP7 RNAi agents disclosed herein, as well as their combination with certain specific targeting ligands suitable for selectively and efficiently delivering the MMP7 RNAi agents to relevant pulmonary cells in vivo, differ from what is previously disclosed or known in the art. The MMP7 RNAi agents disclosed herein provide for highly potent and efficient inhibition of the expression of a MMP7 gene.

[0010] In general, the present disclosure features MMP7 gene-specific RNAi agents, compositions that include MMP7 RNAi agents, and methods for inhibiting expression of a MMP7 gene in vitro and/or in vivo using the MMP7 RNAi agents and compositions that include MMP7 RNAi agents described herein. The MMP7 RNAi agents described herein are able to selectively and efficiently decrease expression of a MMP7 gene, and thereby decrease the amount of MMP7 available which is believed to be pro-fibrotic through potentially multiple mechanisms including by cleaving E-cadherin to activate epithelial cells and proteolytically activating heparin-binding epidermal growth factor precursor (pro-HB-EGF) to release active HB-EGF, which promotes aberrant epithelial migration and human lung fibroblast proliferation, and well as cleaving and activating other pro-fibrotic substrates such as osteopontin and membrane bound Fas ligand (mFasL).

[0011] The described MMP7 RNAi agents can be used in methods for therapeutic treatment (including preventative or prophylactic treatment) of symptoms and diseases including, but not limited to, idiopathic pulmonary fibrosis (IPF), asthma, various other types of fibrosis, chronic inflammation, interstitial lung diseases (ILD), infectious disease (for example, SARS-COV-2), acute lung injury (for example, acute respiratory distress syndrome (ARDS)), pulmonary hypertension, various cancers, nonalcoholic fatty liver disease (NAFLD), nonalcoholic steatohepatitis (NASH), fatty liver disease, biliary atresia, and chronic kidney disease (CKD).

[0012] In one aspect, the disclosure features RNAi agents for inhibiting expression of a MMP7 gene, wherein the RNAi agent includes a sense strand (also referred to as a passenger strand) and an antisense strand (also referred to as a guide strand). The sense strand and the antisense strand can be partially, substantially, or fully complementary to each other. The length of the RNAi agent sense strands described herein each can be 12 to 49 nucleotides in length. The length of the RNAi agent antisense strands described herein each can be 18 to 30 nucleotides in length. In some embodiments, the sense and antisense strands are independently 18 to 26 nucleotides in length. The sense and antisense strands can be either the same length or different lengths. In some embodiments, the sense and antisense strands are independently 21 to 26 nucleotides in length. In some embodiments, the sense and antisense strands are independently 21 to 24 nucleotides in length. In some embodiments, both the sense strand and the antisense strand are 21 nucleotides in length. In some embodiments, the antisense strands are independently 18, 19, 20, 21, 22, 23, 24, 25, 26, 27, 28, 29, or 30 nucleotides in length. In some embodiments, the sense strands are independently 15, 16, 17, 18, 19, 20, 21, 22, 23, 24, 25, 26, 27, 28, 29, 30, 31, 32, 33, 34, 35, 36, 37, 38, 39, 40, 41, 42, 43, 44, 45, 46, 47, 48, or 49 nucleotides in length. The RNAi agents described herein, upon delivery to a cell expressing MMP7 such as a pulmonary cell, inhibit the expression of one or more MMP7 gene variants in vivo and/or in vitro.

[0013] The MMP7 RNAi agents disclosed herein target a human MMP7 gene (see, e.g., SEQ ID NO:1). In some embodiments, the MMP7 RNAi agents disclosed herein target a portion of an MMP7 gene having the sequence of any of the sequences disclosed in Table 1.

[0014] In another aspect, the disclosure features compositions, including pharmaceutical compositions, that include one or more of the disclosed MMP7 RNAi agents that are able to selectively and efficiently decrease expression of an MMP7 gene. The compositions that include one or more MMP7 RNAi agents described herein can be administered to a subject, such as a human or animal subject, for the treatment (including prophylactic treatment or inhibition) of symptoms and diseases including, but not limited to, various pulmonary diseases including idiopathic pulmonary fibrosis (IPF), asthma, various other types of fibrosis, chronic inflammation, interstitial lung diseases (ILD), infectious disease (for example, SARS-COV-2), acute lung injury (for example, acute respiratory distress syndrome (ARDS)), pulmonary hypertension, various cancers, nonalcoholic fatty liver disease (NAFLD), nonalcoholic steatohepatitis (NASH), fatty liver disease, biliary atresia, and chronic kidney disease (CKD).

[0015] Examples of MMP7 RNAi agent sense strands and antisense strands that can be used in a MMP7 RNAi agent are provided in Tables 3, 4, 5, and 6. Examples of MMP7 RNAi agent duplexes are provided in Tables 7A, 7B, 8, 9, and 10. Examples of 19-nucleotide core stretch sequences that may consist of or may be included in the sense strands and antisense strands of certain MMP7 RNAi agents disclosed herein, are provided in Table 2.

[0016] In another aspect, the disclosure features methods for delivering MMP7 RNAi agents to epithelial cells in a subject, such as a mammal, in vivo. Also described herein are compositions for use in such methods. In some embodiments, disclosed herein are methods for delivering MMP7 RNAi agents to pulmonary cells (epithelial cells, macrophages, smooth muscle, endothelial cells) to a subject in vivo. In some embodiments, the subject is a human subject.

[0017] The methods disclosed herein include the administration of one or more MMP7 RNAi agents to a subject, e.g., a human or animal subject, by any suitable means known in the art. The pharmaceutical compositions disclosed herein that include one or more MMP7 RNAi agents can be administered in a number of ways depending upon whether local or systemic treatment is desired. Administration can be, but is not limited to, for example, intravenous, intraarterial, subcutaneous, intraperitoneal, subdermal (e.g., via an implanted device), and intraparenchymal administration. In some embodiments, the pharmaceutical compositions described herein are administered by inhalation (such as dry powder inhalation or aerosol inhalation), intranasal administration, intratracheal administration, or oropharyngeal aspiration administration.

[0018] In some embodiments, it is desired that the MMP7 RNAi agents described herein inhibit the expression of an MMP7 gene in the pulmonary epitheliur, for which the administration is by inhalation (e.g., by an inhaler device, such as a metered-dose inhaler, or a nebulizer such as a jet or vibrating mesh nebulizer, or a soft mist inhaler).

[0019] The one or more MMP7 RNAi agents can be delivered to target cells or tissues using any oligonucleotide delivery technology known in the art. In some embodiments, a MMP7 RNAi agent is delivered to cells or tissues by covalently linking the RNAi agent to a targeting group. In some embodiments, the targeting group can include a cell receptor ligand, such as an integrin targeting ligand. Integrins are a family of transmembrane receptors that facilitate cell-extracellular matrix (ECM) adhesion. In particular, integrin alpha-v-beta-6 (αvβ6) is an epithelial-specific integrin that is known to be a receptor for ECM proteins and the TGF-beta latency-associated peptide (LAP), and is expressed in various cells and tissues. Integrin αvβ6 is known to be highly upregulated in injured pulmonary epithelium. In some embodiments, the MMP7 RNAi agents described herein are linked to an integrin targeting ligand that has affinity for integrin αvβ6. As referred to herein, an “αvβ6 integrin targeting ligand” is a compound that has affinity for integrin αvβ6, which can be utilized as a ligand to facilitate the targeting and delivery of an RNAi agent to which it is attached to the desired cells and/or tissues (i.e., to cells expressing integrin αvβ6). In some embodiments, multiple αvβ6 integrin targeting ligands or clusters of αvβ6 integrin targeting ligands are linked to a MMP7 RNAi agent. In some embodiments, the MMP7 RNAi agent-αvβ6 integrin targeting ligand conjugates are selectively internalized by lung epithelial cells, either through receptor-mediated endocytosis or by other means.

[0020] Examples of targeting groups useful for delivering MMP7 RNAi agents that include αvβ6 integrin targeting ligands are disclosed, for example, in International Patent Application Publication No. WO 2018/085415 and International Patent Application Publication No. WO 2019/089765, the contents of each of which are incorporated by reference herein in their entirety.

[0021] A targeting group can be linked to the 3′ or 5′ end of a sense strand or an antisense strand of a MMP7 RNAi agent. In some embodiments, a targeting group is linked to the 3′ or 5′ end of the sense strand. In some embodiments, a targeting group is linked to the 5′ end of the sense strand. In some embodiments, a targeting group is linked internally to a nucleotide on the sense strand and/or the antisense strand of the RNAi agent. In some embodiments, one or more targeting ligands are linked internally to one or more nucleotides on the sense strand of the RNAi agent. In some embodiments, a targeting group is linked to the RNAi agent via a linker.

[0022] In another aspect, the disclosure features compositions that include one or more MMP7 RNAi agents that have the duplex structures disclosed in Tables 7A, 7B, 8, 9, and 10.

[0023] The use of MMP7 RNAi agents provides methods for therapeutic (including prophylactic) treatment of diseases or disorders for which a reduction in MMP7 can provide a therapeutic benefit. The MMP7 RNAi agents disclosed herein can be used to treat various pulmonary diseases various pulmonary diseases including idiopathic pulmonary fibrosis (IPF), asthma, various other types of fibrosis, chronic inflammation, interstitial lung diseases (ILD), infectious disease (for example, SARS-COV-2), acute lung injury (for example, acute respiratory distress syndrome (ARDS)), pulmonary hypertension, various cancers, nonalcoholic fatty liver disease (NAFLD), nonalcoholic steatohepatitis (NASH), fatty liver disease, biliary atresia, and chronic kidney disease (CKD). In some embodiments, the MMP7 RNAi agents disclosed herein can be used to treat a pulmonary inflammatory disease or condition. MMP7 RNAi agents can be used to treat, for example, IPF or other types of pulmonary fibrosis. Such methods of treatment include administration of a MMP7 RNAi agent to a human being or animal for which a reduction in MMP7 levels is desired.

[0024] As used herein, the terms “oligonucleotide” and “polynucleotide” mean a polymer of linked nucleosides each of which can be independently modified or unmodified.

[0025] As used herein, an “RNAi agent” (also referred to as an “RNAi trigger”) means a composition that contains an RNA or RNA-like (e.g., chemically modified RNA) oligonucleotide molecule that is capable of degrading or inhibiting (e.g., degrades or inhibits under appropriate conditions) translation of messenger RNA (mRNA) transcripts of a target mRNA in a sequence specific manner. As used herein, RNAi agents may operate through the RNA interference mechanism (i.e., inducing RNA interference through interaction with the RNA interference pathway machinery (RNA-induced silencing complex or RISC) of mammalian cells), or by any alternative mechanism(s) or pathway(s). While it is believed that RNAi agents, as that term is used herein, operate primarily through the RNA interference mechanism, the disclosed RNAi agents are not bound by or limited to any particular pathway or mechanism of action. RNAi agents disclosed herein are comprised of a sense strand and an antisense strand, and include, but are not limited to: short (or small) interfering RNAs (siRNAs), double stranded RNAs (dsRNA), micro RNAs (miRNAs), short hairpin RNAs (shRNA), and dicer substrates. The antisense strand of the RNAi agents described herein is at least partially complementary to the mRNA being targeted (i.e. MMP7 mRNA). RNAi agents can include one or more modified nucleotides and/or one or more non-phosphodiester linkages.

[0026] As used herein, the terms “silence,” “reduce,” “inhibit,” “down-regulate,” or “knockdown” when referring to expression of a given gene, mean that the expression of the gene, as measured by the level of RNA transcribed from the gene or the level of polypeptide, protein, or protein subunit translated from the mRNA in a cell, group of cells, tissue, organ, or subject in which the gene is transcribed, is reduced when the cell, group of cells, tissue, organ, or subject is treated with the RNAi agents described herein as compared to a second cell, group of cells, tissue, organ, or subject that has not or have not been so treated.

[0027] As used herein, the terms “sequence” and “nucleotide sequence” mean a succession or order of nucleobases or nucleotides, described with a succession of letters using standard nomenclature.

[0028] As used herein, a “base,” “nucleotide base,” or “nucleobase,” is a heterocyclic pyrimidine or purine compound that is a component of a nucleotide, and includes the primary purine bases adenine and guanine, and the primary pyrimidine bases cytosine, thymine, and uracil. A nucleobase may further be modified to include, without limitation, universal bases, hydrophobic bases, promiscuous bases, size-expanded bases, and fluorinated bases. (See, e.g., Modified Nucleosides in Biochemistry, Biotechnology and Medicine, Herdewijn, P. ed. Wiley-VCH, 2008). The synthesis of such modified nucleobases (including phosphoramidite compounds that include modified nucleobases) is known in the art.

[0029] As used herein, and unless otherwise indicated, the term “complementary,” when used to describe a first nucleobase or nucleotide sequence (e.g., RNAi agent sense strand or targeted mRNA) in relation to a second nucleobase or nucleotide sequence (e.g., RNAi agent antisense strand or a single-stranded antisense oligonucleotide), means the ability of an oligonucleotide or polynucleotide including the first nucleotide sequence to hybridize (form base pair hydrogen bonds under mammalian physiological conditions (or otherwise suitable in vivo or in vitro conditions)) and form a duplex or double helical structure under certain standard conditions with an oligonucleotide that includes the second nucleotide sequence. The person of ordinary skill in the art would be able to select the set of conditions most appropriate for a hybridization test. Complementary sequences include Watson-Crick base pairs or non-Watson-Crick base pairs and include natural or modified nucleotides or nucleotide mimics, at least to the extent that the above hybridization requirements are fulfilled. Sequence identity or complementarity is independent of modification. For example, a and Af, as defined herein, are complementary to U (or T) and identical to A for the purposes of determining identity or complementarity.

[0030] As used herein, “perfectly complementary” or “fully complementary” means that in a hybridized pair of nucleobase or nucleotide sequence molecules, all (100%) of the bases in a contiguous sequence of a first oligonucleotide will hybridize with the same number of bases in a contiguous sequence of a second oligonucleotide. The contiguous sequence may comprise all or a part of a first or second nucleotide sequence.

[0031] As used herein, “partially complementary” means that in a hybridized pair of nucleobase or nucleotide sequence molecules, at least 70%, but not all, of the bases in a contiguous sequence of a first oligonucleotide will hybridize with the same number of bases in a contiguous sequence of a second oligonucleotide. The contiguous sequence may comprise all or a part of a first or second nucleotide sequence.

[0032] As used herein, “substantially complementary” means that in a hybridized pair of nucleobase or nucleotide sequence molecules, at least 85%, but not all, of the bases in a contiguous sequence of a first oligonucleotide will hybridize with the same number of bases in a contiguous sequence of a second oligonucleotide. The contiguous sequence may comprise all or a part of a first or second nucleotide sequence.

[0033] As used herein, the terms “complementary,” “fully complementary,” “partially complementary,” and “substantially complementary” are used with respect to the nucleobase or nucleotide matching between the sense strand and the antisense strand of an RNAi agent, or between the antisense strand of an RNAi agent and a sequence of an MMP7 mRNA.

[0034] As used herein, the term “substantially identical” or “substantial identity,” as applied to a nucleic acid sequence means the nucleotide sequence (or a portion of a nucleotide sequence) has at least about 85% sequence identity or more, e.g., at least 90%, at least 95%, or at least 99% identity, compared to a reference sequence. Percentage of sequence identity is determined by comparing two optimally aligned sequences over a comparison window. The percentage is calculated by determining the number of positions at which the same type of nucleic acid base occurs in both sequences to yield the number of matched positions, dividing the number of matched positions by the total number of positions in the window of comparison and multiplying the result by 100 to yield the percentage of sequence identity. The inventions disclosed herein encompass nucleotide sequences substantially identical to those disclosed herein.

[0035] As used herein, the terms “treat,” “treatment,” and the like, mean the methods or steps taken to provide relief from or alleviation of the number, severity, and/or frequency of one or more symptoms of a disease in a subject. As used herein, “treat” and “treatment” may include the prevention, management, prophylactic treatment, and/or inhibition or reduction of the number, severity, and/or frequency of one or more symptoms of a disease in a subject.

[0036] As used herein, the phrase “introducing into a cell,” when referring to an RNAi agent, means functionally delivering the RNAi agent into a cell. The phrase “functional delivery,” means delivering the RNAi agent to the cell in a manner that enables the RNAi agent to have the expected biological activity, e.g., sequence-specific inhibition of gene expression.

[0037] Unless stated otherwise, use of the symbol

[chemical structure]

as used herein means that any group or groups may be linked thereto that is in accordance with the scope of the inventions described herein.

[0038] As used herein, the term “isomers” refers to compounds that have identical molecular formulae, but that differ in the nature or the sequence of bonding of their atoms or in the arrangement of their atoms in space. Isomers that differ in the arrangement of their atoms in space are termed “stereoisomers.” Stereoisomers that are not mirror images of one another are termed “diastereoisomers,” and stereoisomers that are non-superimposable mirror images are termed “enantiomers,” or sometimes optical isomers. A carbon atom bonded to four non-identical substituents is termed a “chiral center.”

[0039] As used herein, unless specifically identified in a structure as having a particular conformation, for each structure in which asymmetric centers are present and thus give rise to enantiomers, diastereomers, or other stereoisomeric configurations, each structure disclosed herein is intended to represent all such possible isomers, including their optically pure and racemic forms. For example, the structures disclosed herein are intended to cover mixtures of diastereomers as well as single stereoisomers.

[0040] As used in a claim herein, the phrase “consisting of” excludes any element, step, or ingredient not specified in the claim. When used in a claim herein, the phrase “consisting essentially of” limits the scope of a claim to the specified materials or steps and those that do not materially affect the basic and novel characteristic(s) of the claimed invention.

[0041] The person of ordinary skill in the art would readily understand and appreciate that the compounds and compositions disclosed herein may have certain atoms (e.g., N, O, or S atoms) in a protonated or deprotonated state, depending upon the environment in which the compound or composition is placed. Accordingly, as used herein, the structures disclosed herein envisage that certain functional groups, such as, for example, OH, SH, or NH, may be protonated or deprotonated. The disclosure herein is intended to cover the disclosed compounds and compositions regardless of their state of protonation based on the environment (such as pH), as would be readily understood by the person of ordinary skill in the art. Correspondingly, compounds described herein with labile protons or basic atoms should also be understood to represent salt forms of the corresponding compound. Compounds described herein may be in a free acid, free base, or salt form. Pharmaceutically acceptable salts of the compounds described herein should be understood to be within the scope of the invention.

[0042] As used herein, the term “linked” or “conjugated” when referring to the connection between two compounds or molecules means that two compounds or molecules are joined by a covalent bond. Unless stated, the terms “linked” and “conjugated” as used herein may refer to the connection between a first compound and a second compound either with or without any intervening atoms or groups of atoms.

[0043] As used herein, the term “including” is used to herein mean, and is used interchangeably with, the phrase “including but not limited to.” The term “or” is used herein to mean, and is used interchangeably with, the term “and/or,” unless the context clearly indicates otherwise.

[0044] Unless otherwise defined, all technical and scientific terms used herein have the same meaning as commonly understood by one of ordinary skill in the art. Although methods and materials similar or equivalent to those described herein can be used in the practice or testing of the present invention, suitable methods and materials are described below. All publications, patent applications, patents, and other references mentioned herein are incorporated by reference in their entirety. In case of conflict, the present specification, including definitions, will control. In addition, the materials, methods, and examples are illustrative only and not intended to be limiting.

[0045] Other objects, features, aspects, and advantages of the invention will be apparent from the following detailed description, accompanying figures, and from the claims.

### BRIEF DESCRIPTION OF THE DRAWINGS

[0046] FIG. 1. Chemical structure representation of the tridentate αvβ6 epithelial cell targeting ligand referred to herein as Tri-SM6.1-αvβ6-(TA14).

[0047] FIG. 2. Chemical structure representation of the peptide αvβ6 epithelial cell targeting ligand referred to herein as αvβ6-pep1.

[0048] FIG. 3. MTT colorimetric assay for cell metabolic activity, demonstrating little cytotoxic effect of MMP7 RNAi agent, as described in Example 24.

[0049] FIG. 4A. Schematic diagram of the modified sense and antisense strands of the MMP7 RNAi agent conjugate having the structure of AC001651 (see, e.g., Tables 8 and 10), having a tridentate αvβ6 epithelial cell targeting ligand linked at the 5′ end of the sense strand.

The following abbreviations are used in FIGS. 4A to 4F: a, c, g, and u are 2′-O-methyl modified nucleotides; Af, Cf, Gf, and Uf are 2′-fluoro modified nucleotides; o is a phosphodiester linkage; s is a phosphorothioate linkage; invAb is an inverted abasic residue (see, e.g., Table 11); cPrpu is a 5′-cyclopropyl phosphonate-2′-O-methyluridine modified nucleotide (see, e.g., Table 11); cPrpa is a 5′-cyclopropyl phosphonate-2′-O-methyladenosine modified nucleotide (see, e.g., Table 11); Tri-SM6.1-αvβ6-(TA14) is the tridentate αvβ6 epithelial cell targeting ligand having the structure shown in FIG. 1; and (TriAlk14) is the linking group as shown in Table 11, which is suitable for subsequent conjugation to targeting ligands (See also, Example 1 herein).

[0050] FIG. 4B. Schematic diagram of the modified sense and antisense strands of the MMP7 RNAi agent conjugate having the structure of AC001514 (see, e.g., Tables 8 and 10), having a tridentate αvβ6 epithelial cell targeting ligand linked at the 5′ end of the sense strand.

[0051] FIG. 4C. Schematic diagram of the modified sense and antisense strands of the MMP7 RNAi agent conjugate having the structure of AC0002023 (see, e.g., Tables 8 and 10), having a tridentate αvβ6 epithelial cell targeting ligand linked at the 5′ end of the sense strand.

[0052] FIG. 4D. Schematic diagram of the modified sense and antisense strands of the MMP7 RNAi agent duplex having the structure of AD09887 (see, e.g., Tables 8 and 10), having a (TriAlk14) linker at the 5′ end of the sense strand.

[0053] FIG. 4E. Schematic diagram of the modified sense and antisense strands of the MMP7 RNAi agent duplex having the structure of AD09667 (see, e.g., Tables 8 and 10), having a (TriAlk14) linker at the 5′ end of the sense strand.

[0054] FIG. 4F. Schematic diagram of the modified sense and antisense strands of the MMP7 RNAi agent duplex having the structure of AD10441 (see, e.g., Tables 8 and 10), having a (TriAlk14) linker at the 5′ end of the sense strand.

### DETAILED DESCRIPTION

### RNAi Agents

[0055] Described herein are RNAi agents for inhibiting expression of the MMP7 gene (referred to herein as MMP7 RNAi agents or MMP7 RNAi triggers). Each MMP7 RNAi agent disclosed herein comprises a sense strand and an antisense strand. The sense strand can be 12 to 49 nucleotides in length. In some embodiments, the sense strand is 12 to 49 nucleotides in length. The antisense strand can be 18 to 49 nucleotides in length. The sense and antisense strands can be either the same length or they can be different lengths. In some embodiments, the sense and antisense strands are each independently 18 to 27 nucleotides in length. In some embodiments, both the sense and antisense strands are each 21-26 nucleotides in length. In some embodiments, the sense and antisense strands are each 21-24 nucleotides in length. In some embodiments, the sense and antisense strands are each independently 19-21 nucleotides in length. In some embodiments, the sense strand is about 19 nucleotides in length while the antisense strand is about 21 nucleotides in length. In some embodiments, the sense strand is about 21 nucleotides in length while the antisense strand is about 23 nucleotides in length. In some embodiments, a sense strand is 23 nucleotides in length and an antisense strand is 21 nucleotides in length. In some embodiments, both the sense and antisense strands are each 21 nucleotides in length. In some embodiments, the RNAi agent sense strands are each independently 12, 13, 14, 15, 16, 17, 18, 19, 20, 21, 22, 23, 24, 25, 26, 27, 28, 29, 30, 31, 32, 33, 34, 35, 36, 37, 38, 39, 40, 41, 42, 43, 44, 45, 46, 47, 48, or 49 nucleotides in length. In some embodiments, the RNAi agent antisense strands are each independently 18, 19, 20, 21, 22, 23, 24, 25, 26, 27, 28, 29, or 30 nucleotides in length. In some embodiments, the RNAi agent is double stranded and has a duplex length of about 12, 13, 14, 15, 16, 17, 18, 19, 20, 21, 22, 23 or 24 nucleotides. In some embodiments, the RNAi agent is double stranded and has a duplex length of 19, 20, 21, 22, or 23 nucleotides.

[0056] Examples of nucleotide sequences used in forming MMP7 RNAi agents are provided in Tables 2, 3, 4, 5, 6, and 10. Examples of RNAi agent duplexes, that include the sense strand and antisense strand sequences in Tables 2, 3, 4, 5, 6, are shown in Tables 7A, 7B, 8, 9, and 10.

[0057] In some embodiments, the region of perfect, substantial, or partial complementarity between the sense strand and the antisense strand is 16-26 (e.g., 16, 17, 18, 19, 20, 21, 22, 23, 24, 25, or 26) nucleotides in length and occurs at or near the 5′ end of the antisense strand (e.g., this region may be separated from the 5′ end of the antisense strand by 0, 1, 2, 3, or 4 nucleotides that are not perfectly, substantially, or partially complementary).

[0058] A sense strand of the MMP7 RNAi agents described herein includes at least 12 consecutive nucleotides that have at least 85% identity to a core stretch sequence (also referred to herein as a “core stretch” or “core sequence”) of the same number of nucleotides in an MMP7 mRNA. In some embodiments, a sense strand core stretch sequence is 100% (perfectly) complementary or at least about 85% (substantially) complementary to a core stretch sequence in the antisense strand, and thus the sense strand core stretch sequence is typically perfectly identical or at least about 85% identical to a nucleotide sequence of the same length (sometimes referred to, e.g., as a target sequence) present in the MMP7 mRNA target. In some embodiments, this sense strand core stretch is 16, 17, 18, 19, 20, 21, 22, or 23 nucleotides in length. In some embodiments, this sense strand core stretch is 17 nucleotides in length. In some embodiments, this sense strand core stretch is 19 nucleotides in length. In some embodiments, this sense strand core stretch is 21 nucleotides in length.

[0059] An antisense strand of a MMP7 RNAi agent described herein includes at least 15 consecutive nucleotides that have at least 85% complementarity to a core stretch of the same number of nucleotides in an MMP7 mRNA and to a core stretch of the same number of nucleotides in the corresponding sense strand. In some embodiments, an antisense strand core stretch is 100% (perfectly) complementary or at least about 85% (substantially) complementary to a nucleotide sequence (e.g., target sequence) of the same length present in the MMP7 mRNA target. In some embodiments, this antisense strand core stretch is 17, 18, 19, 20, 21, 22, or 23 nucleotides in length. In some embodiments, this antisense strand core stretch is 19 nucleotides in length. In some embodiments, this antisense strand core stretch is 17 nucleotides in length. A sense strand core stretch sequence can be the same length as a corresponding antisense core sequence or it can be a different length.

[0060] The MMP7 RNAi agent sense and antisense strands anneal to form a duplex. A sense strand and an antisense strand of a MMP7 RNAi agent can be partially, substantially, or fully complementary to each other. Within the complementary duplex region, the sense strand core stretch sequence is at least 85% complementary or 100% complementary to the antisense core stretch sequence. In some embodiments, the sense strand core stretch sequence contains a sequence of at least 16, at least 17, at least 18, at least 19, at least 20, at least 21, at least 22, or at least 23 nucleotides that is at least 85% or 100% complementary to a corresponding 16, 17, 18, 19, 20, 21, 22, or 23 nucleotide sequence of the antisense strand core stretch sequence (i.e., the sense and antisense core stretch sequences of a MMP7 RNAi agent have a region of at least 16, at least 17, at least 18, at least 19, at least 20, at least 21, at least 22, or at least 23 nucleotides that is at least 85% base paired or 100% base paired.)

[0061] In some embodiments, the antisense strand of a MMP7 RNAi agent disclosed herein differs by 0, 1, 2, or 3 nucleotides from any of the antisense strand sequences in Table 2 or Table 3. In some embodiments, the sense strand of a MMP7 RNAi agent disclosed herein differs by 0, 1, 2, or 3 nucleotides from any of the sense strand sequences in Table 2, Table 4, Table 5, Table 6, or Table 10.

[0062] In some embodiments, the sense strand and/or the antisense strand can optionally and independently contain an additional 1, 2, 3, 4, 5, or 6 nucleotides (extension) at the 3′ end, the 5′ end, or both the 3′ and 5′ ends of the core stretch sequences. The antisense strand additional nucleotides, if present, may or may not be complementary to the corresponding sequence in the MMP7 mRNA. The sense strand additional nucleotides, if present, may or may not be identical to the corresponding sequence in the MMP7 mRNA. The antisense strand additional nucleotides, if present, may or may not be complementary to the corresponding sense strand's additional nucleotides, if present.

[0063] As used herein, an extension comprises 1, 2, 3, 4, 5, or 6 nucleotides at the 5′ and/or 3′ end of the sense strand core stretch sequence and/or antisense strand core stretch sequence. The extension nucleotides on a sense strand may or may not be complementary to nucleotides, either core stretch sequence nucleotides or extension nucleotides, in the corresponding antisense strand. Conversely, the extension nucleotides on an antisense strand may or may not be complementary to nucleotides, either core stretch nucleotides or extension nucleotides, in the corresponding sense strand. In some embodiments, both the sense strand and the antisense strand of an RNAi agent contain 3′ and 5′ extensions. In some embodiments, one or more of the 3′ extension nucleotides of one strand base pairs with one or more 5′ extension nucleotides of the other strand. In other embodiments, one or more of 3′ extension nucleotides of one strand do not base pair with one or more 5′ extension nucleotides of the other strand. In some embodiments, a MMP7 RNAi agent has an antisense strand having a 3′ extension and a sense strand having a 5′ extension. In some embodiments, the extension nucleotide(s) are unpaired and form an overhang. As used herein, an “overhang” refers to a stretch of one or more unpaired nucleotides located at a terminal end of either the sense strand or the antisense strand that does not form part of the hybridized or duplexed portion of an RNAi agent disclosed herein (See, e.g., U.S. Pat. No. 8,362,231).

[0064] In some embodiments, a MMP7 RNAi agent comprises an antisense strand having a 3′ extension of 1, 2, 3, 4, 5, or 6 nucleotides in length. In other embodiments, a MMP7 RNAi agent comprises an antisense strand having a 3′ extension of 1, 2, or 3 nucleotides in length. In some embodiments, one or more of the antisense strand extension nucleotides comprise nucleotides that are complementary to the corresponding MMP7 mRNA sequence. In some embodiments, one or more of the antisense strand extension nucleotides comprise nucleotides that are not complementary to the corresponding MMP7 mRNA sequence.

[0065] In some embodiments, a MMP7 RNAi agent comprises a sense strand having a 3′ extension of 1, 2, 3, 4, or 5 nucleotides in length. In some embodiments, one or more of the sense strand extension nucleotides comprises adenosine, uracil, or thymidine nucleotides, AT dinucleotide, or nucleotides that correspond to or are the identical to nucleotides in the MMP7 mRNA sequence. In some embodiments, the 3′ sense strand extension includes or consists of one of the following sequences, but is not limited to: T, UT, TT, UU, UUT, TTT, or TTTT (each listed 5′ to 3′).

[0066] A sense strand can have a 3′ extension and/or a 5′ extension. In some embodiments, a MMP7 RNAi agent comprises a sense strand having a 5′ extension of 1, 2, 3, 4, 5, or 6 nucleotides in length. In some embodiments, one or more of the sense strand extension nucleotides comprise nucleotides that correspond to or are identical to nucleotides in the MMP7 mRNA sequence.

[0067] Examples of sequences used in forming MMP7 RNAi agents are provided in Tables 2, 3, 4, 5, 6, and 10. In some embodiments, a MMP7 RNAi agent antisense strand includes a sequence of any of the sequences in Tables 2, 3, or 10. In certain embodiments, a MMP7 RNAi agent antisense strand comprises or consists of any one of the modified sequences in Table 3. In some embodiments, a MMP7 RNAi agent antisense strand includes the sequence of nucleotides (from 5′ end→3′ end) 1-17, 2-15, 2-17, 1-18, 2-18, 1-19, 2-19, 1-20, 2-20, 1-21, or 2-21, of any of the sequences in Tables 2 or 3. In some embodiments, a MMP7 RNAi agent sense strand includes the sequence of any of the sequences in Tables 2, 4, 5, or 6. In some embodiments, a MMP7 RNAi agent sense strand includes the sequence of nucleotides (from 5′ end→3′ end) 1-18, 1-19, 1-20, 1-21, 2-19, 2-20, 2-21, 3-20, 3-21, or 4-21 of any of the sequences in Tables 2, 4, 5, or 6. In certain embodiments, a MMP7 RNAi agent sense strand comprises or consists of a modified sequence of any one of the modified sequences in Table 4, 5, 6, or 10.

[0068] In some embodiments, the sense and antisense strands of the RNAi agents described herein contain the same number of nucleotides. In some embodiments, the sense and antisense strands of the RNAi agents described herein contain different numbers of nucleotides. In some embodiments, the sense strand 5′ end and the antisense strand 3′ end of an RNAi agent form a blunt end. In some embodiments, the sense strand 3′ end and the antisense strand 5′ end of an RNAi agent form a blunt end. In some embodiments, both ends of an RNAi agent form blunt ends. In some embodiments, neither end of an RNAi agent is blunt-ended. As used herein a “blunt end” refers to an end of a double stranded RNAi agent in which the terminal nucleotides of the two annealed strands are complementary (form a complementary base-pair).

[0069] In some embodiments, the sense strand 5′ end and the antisense strand 3′ end of an RNAi agent form a frayed end. In some embodiments, the sense strand 3′ end and the antisense strand 5′ end of an RNAi agent form a frayed end. In some embodiments, both ends of an RNAi agent form a frayed end. In some embodiments, neither end of an RNAi agent is a frayed end. As used herein a frayed end refers to an end of a double stranded RNAi agent in which the terminal nucleotides of the two annealed strands form a pair (i.e., do not form an overhang) but are not complementary (i.e. form a non-complementary pair). In some embodiments, one or more unpaired nucleotides at the end of one strand of a double stranded RNAi agent form an overhang. The unpaired nucleotides may be on the sense strand or the antisense strand, creating either 3′ or 5′ overhangs. In some embodiments, the RNAi agent contains: a blunt end and a frayed end, a blunt end and 5′ overhang end, a blunt end and a 3′ overhang end, a frayed end and a 5′ overhang end, a frayed end and a 3′ overhang end, two 5′ overhang ends, two 3′ overhang ends, a 5′ overhang end and a 3′ overhang end, two frayed ends, or two blunt ends. Typically, when present, overhangs are located at the 3′ terminal ends of the sense strand, the antisense strand, or both the sense strand and the antisense strand.

[0070] The MMP7 RNAi agents disclosed herein may also be comprised of one or more modified nucleotides. In some embodiments, substantially all of the nucleotides of the sense strand and substantially all of the nucleotides of the antisense strand of the MMP7 RNAi agent are modified nucleotides. The MMP7 RNAi agents disclosed herein may further be comprised of one or more modified internucleoside linkages, e.g., one or more phosphorothioate linkages. In some embodiments, a MMP7 RNAi agent contains one or more modified nucleotides and one or more modified internucleoside linkages. In some embodiments, a 2′-modified nucleotide is combined with modified internucleoside linkage.

[0071] In some embodiments, a MMP7 RNAi agent is prepared or provided as a salt, mixed salt, or a free-acid. In some embodiments, a MMP7 RNAi agent is prepared as a pharmaceutically acceptable salt. In some embodiments, a MMP7 RNAi agent is prepared as a pharmaceutically acceptable sodium salt. Such forms that are well known in the art are within the scope of the inventions disclosed herein.

### Modified Nucleotides

[0072] Modified nucleotides, when used in various oligonucleotide constructs, can preserve activity of the compound in cells while at the same time increasing the serum stability of these compounds, and can also minimize the possibility of activating interferon activity in humans upon administration of the oligonucleotide construct.

[0073] In some embodiments, a MMP7 RNAi agent contains one or more modified nucleotides. As used herein, a “modified nucleotide” is a nucleotide other than a ribonucleotide (2′-hydroxyl nucleotide). In some embodiments, at least 50% (e.g., at least 60%, at least 70%, at least 80%, at least 90%, at least 95%, at least 97%, at least 98%, at least 99%, or 100%) of the nucleotides are modified nucleotides. As used herein, modified nucleotides can include, but are not limited to, deoxyribonucleotides, nucleotide mimics, abasic nucleotides, 2′-modified nucleotides, inverted nucleotides, modified nucleobase-comprising nucleotides, bridged nucleotides, peptide nucleic acids (PNAs), 2′,3′-seco nucleotide mimics (unlocked nucleobase analogues), locked nucleotides, 3′-O-methoxy (2′ internucleoside linked) nucleotides, 2′-F-Arabino nucleotides, 5′-Methyl-2′-fluoro nucleotides, morpholino nucleotides (modified nucleotides with a morpholine ring), nucleotides where the typical 5-membered sugar ring of the nucleotide has been modified, vinyl phosphonate deoxyribonucleotides, vinyl phosphonate containing nucleotides, and cyclopropyl phosphonate containing nucleotides. 2′-modified nucleotides (i.e., a nucleotide with a group other than a hydroxyl group at the 2′ position of the five-membered sugar ring) include, but are not limited to, 2′-O-methyl nucleotides (also referred to as 2′-methoxy nucleotides), 2′-fluoro nucleotides (also referred to herein as 2′-deoxy-2′-fluoro nucleotides), 2′-deoxy nucleotides, 2′-methoxyethyl (2′-O-2-methoxylethyl) nucleotides (also referred to as 2′-MOE), 2′-amino nucleotides, 2′-halo nucleotides, and 2′-alkyl nucleotides. It is not necessary for all positions in a given compound to be uniformly modified. Conversely, more than one modification can be incorporated in a single MMP7 RNAi agent or even in a single nucleotide thereof. The MMP7 RNAi agent sense strands and antisense strands can be synthesized and/or modified by methods known in the art. Modification at one nucleotide is independent of modification at another nucleotide.

[0074] Modified nucleobases include synthetic and natural nucleobases, such as 5-substituted pyrinidines, 6-azapyrimidines and N-2, N-6 and O-6 substituted purines, (e.g., 2-aninopropyladenine, 5-propynyluracil, or 5-propynylcytosine), 5-methylcytosine (5-me-C), 5-hydroxymethyl cytosine, inosine, xanthine, hypoxanthine, 2-aninoadenine, 6-alkyl (e.g., 6-methyl, 6-ethyl, 6-isopropyl, or 6-n-butyl) derivatives of adenine and guanine, 2-alkyl (e.g., 2-methyl, 2-ethyl, 2-isopropyl, or 2-n-butyl) and other alkyl derivatives of adenine and guanine, 2-thiouracil, 2-thiothymine, 2-thiocytosine, 5-halouracil, cytosine, 5-propynyl uracil, 5-propynyl cytosine, 6-azo uracil, 6-azo cytosine, 6-azo thymine, 5-uracil (pseudouracil), 4-thiouracil, 8-halo, 8-amino, 8-sulflydryl, 8-thioalkyl, 8-hydroxyl and other 8-substituted adenines and guanines, 5-halo (e.g., 5-bromo), 5-trifluoromethyl, and other 5-substituted uracils and cytosines, 7-methylguanine and 7-mnethyladenine, 8-azaguanine and 8-azaadenine, 7-deazaguanine, 7-deazaadenine, 3-deazaguanine, and 3-deazaadenine.

[0075] In some embodiments, the 5′ and/or 3′ end of the antisense strand can include abasic residues (Ab), which can also be referred to as an “abasic site” or “abasic nucleotide.” An abasic residue (Ab) is a nucleotide or nucleoside that lacks a nucleobase at the 1′ position of the sugar moiety. (See, e.g., U.S. Pat. No. 5,998,203). In some embodiments, an abasic residue can be placed internally in a nucleotide sequence. In some embodiments, Ab or AbAb can be added to the 3′ end of the antisense strand. In some embodiments, the 5′ end of the sense strand can include one or more additional abasic residues (e.g., (Ab) or (AbAb)). In some embodiments, UUAb, UAb, or Ab are added to the 3′ end of the sense strand. In some embodiments, an abasic (deoxyribose) residue can be replaced with a ribitol (abasic ribose) residue.

[0076] In some embodiments, all or substantially all of the nucleotides of an RNAi agent are modified nucleotides. As used herein, an RNAi agent wherein substantially all of the nucleotides present are modified nucleotides is an RNAi agent having four or fewer (i.e., 0, 1, 2, 3, or 4) nucleotides in both the sense strand and the antisense strand being ribonucleotides (i.e., unmodified). As used herein, a sense strand wherein substantially all of the nucleotides present are modified nucleotides is a sense strand having two or fewer (i.e., 0, 1, or 2) nucleotides in the sense strand being unmodified ribonucleotides. As used herein, an antisense sense strand wherein substantially all of the nucleotides present are modified nucleotides is an antisense strand having two or fewer (i.e., 0, 1, or 2) nucleotides in the antisense strand being unmodified ribonucleotides. In some embodiments, one or more nucleotides of an RNAi agent is an unmodified ribonucleotide. Chemical structures for certain modified nucleotides are set forth in Table 11 herein.

### Modified Internucleoside Linkages

[0077] In some embodiments, one or more nucleotides of a MMP7 RNAi agent are linked by non-standard linkages or backbones (i.e., modified internucleoside linkages or modified backbones). Modified internucleoside linkages or backbones include, but are not limited to, phosphorothioate groups (represented herein as a lower case “s”), chiral phosphorothioates, thiophosphates, phosphorodithioates, phosphotriesters, aminoalkyl-phosphotriesters, alkyl phosphonates (e.g., methyl phosphonates or 3′-alkylene phosphonates), chiral phosphonates, phosphinates, phosphoramidates (e.g., 3′-amino phosphoramidate, aminoalkylphosphoramidates, or thionophosphoramidates), thionoalkyl-phosphonates, thionoalkylphosphotriesters, morpholino linkages, boranophosphates having normal 3′-5′ linkages, 2′-5′ linked analogs of boranophosphates, or boranophosphates having inverted polarity wherein the adjacent pairs of nucleoside units are linked 3′-5′ to 5′-3′ or 2′-5′ to 5′-2′. In some embodiments, a modified internucleoside linkage or backbone lacks a phosphorus atom. Modified internucleoside linkages lacking a phosphorus atom include, but are not limited to, short chain alkyl or cycloalkyl inter-sugar linkages, mixed heteroatom and alkyl or cycloalkyl inter-sugar linkages, or one or more short chain heteroatomic or heterocyclic inter-sugar linkages. In some embodiments, modified internucleoside backbones include, but are not limited to, siloxane backbones, sulfide backbones, sulfoxide backbones, sulfone backbones, formacetyl and thioformacetyl backbones, methylene formacetyl and thioformacetyl backbones, alkene-containing backbones, sulfamate backbones, methyleneimino and methylenehydrazino backbones, sulfonate and sulfonamide backbones, amide backbones, and other backbones having mixed N, O, S, and CH₂ components.

[0078] In some embodiments, a sense strand of a MMP7 RNAi agent can contain 1, 2, 3, 4, 5, or 6 phosphorothioate linkages, an antisense strand of a MMP7 RNAi agent can contain 1, 2, 3, 4, 5, or 6 phosphorothioate linkages, or both the sense strand and the antisense strand independently can contain 1, 2, 3, 4, 5, or 6 phosphorothioate linkages. In some embodiments, a sense strand of a MMP7 RNAi agent can contain 1, 2, 3, or 4 phosphorothioate linkages, an antisense strand of a MMP7 RNAi agent can contain 1, 2, 3, or 4 phosphorothioate linkages, or both the sense strand and the antisense strand independently can contain 1, 2, 3, or 4 phosphorothioate linkages.

[0079] In some embodiments, a MMP7 RNAi agent sense strand contains at least two phosphorothioate internucleoside linkages. In some embodiments, the phosphorothioate internucleoside linkages are between the nucleotides at positions 1-3 from the 3′ end of the sense strand. In some embodiments, one phosphorothioate internucleoside linkage is at the 5′ end of the sense strand nucleotide sequence, and another phosphorothioate linkage is at the 3′ end of the sense strand nucleotide sequence. In some embodiments, two phosphorothioate internucleoside linkage are located at the 5′ end of the sense strand, and another phosphorothioate linkage is at the 3′ end of the sense strand. In some embodiments, the sense strand does not include any phosphorothioate internucleoside linkages between the nucleotides, but contains one, two, or three phosphorothioate linkages between the terminal nucleotides on both the 5′ and 3′ ends and the optionally present inverted abasic residue terminal caps. In some embodiments, the targeting ligand is linked to the sense strand via a phosphorothioate linkage.

[0080] In some embodiments, a MMP7 RNAi agent antisense strand contains four phosphorothioate internucleoside linkages. In some embodiments, the four phosphorothioate internucleoside linkages are between the nucleotides at positions 1-3 from the 5′ end of the antisense strand and between the nucleotides at positions 19-21, 20-22, 21-23, 22-24, 23-25, or 24-26 from the 5′ end. In some embodiments, three phosphorothioate internucleoside linkages are located between positions 1-4 from the 5′ end of the antisense strand, and a fourth phosphorothioate internucleoside linkage is located between positions 20-21 from the 5′ end of the antisense strand. In some embodiments, a MMP7 RNAi agent contains at least three or four phosphorothioate internucleoside linkages in the antisense strand.

### Capping Residues or Moieties

[0081] In some embodiments, the sense strand may include one or more capping residues or moieties, sometimes referred to in the art as a “cap,” a “terminal cap,” or a “capping residue.” As used herein, a “capping residue” is anon-nucleotide compound or other moiety that can be incorporated at one or more termini of a nucleotide sequence of an RNAi agent disclosed herein. A capping residue can provide the RNAi agent, in some instances, with certain beneficial properties, such as, for example, protection against exonuclease degradation. In some embodiments, inverted abasic residues (invAb) (also referred to in the art as “inverted abasic sites”) are added as capping residues (see Table 11). (See, e.g., F. Czaudema, Nucleic Acids Res., 2003, 31(11), 2705-16). Capping residues are generally known in the art, and include, for example, inverted abasic residues as well as carbon chains such as a terminal C₃H₇ (propyl), C₆H₁₃ (hexyl), or C₁₂H₂₅ (dodecyl) groups. In some embodiments, a capping residue is present at either the 5′ terminal end, the 3′ terminal end, or both the 5′ and 3′ terminal ends of the sense strand. In some embodiments, the 5′ end and/or the 3′ end of the sense strand may include more than one inverted abasic deoxyribose moiety as a capping residue.

[0082] In some embodiments, one or more inverted abasic residues (invAb) are added to the 3′ end of the sense strand. In some embodiments, one or more inverted abasic residues (invAb) are added to the 5′ end of the sense strand. In some embodiments, one or more inverted abasic residues or inverted abasic sites are inserted between the targeting ligand and the nucleotide sequence of the sense strand of the RNAi agent. In some embodiments, the inclusion of one or more inverted abasic residues or inverted abasic sites at or near the terminal end or terminal ends of the sense strand of an RNAi agent allows for enhanced activity or other desired properties of an RNAi agent.

[0083] In some embodiments, one or more inverted abasic residues (invAb) are added to the 5′ end of the sense strand. In some embodiments, one or more inverted abasic residues can be inserted between the targeting ligand and the nucleotide sequence of the sense strand of the RNAi agent. The inverted abasic residues may be linked via phosphate, phosphorothioate (e.g., shown herein as (invAb)s)), or other internucleoside linkages. In some embodiments, the inclusion of one or more inverted abasic residues at or near the terminal end or terminal ends of the sense strand of an RNAi agent may allow for enhanced activity or other desired properties of an RNAi agent. In some embodiments, an inverted abasic (deoxyribose) residue can be replaced with an inverted ribitol (abasic ribose) residue. In some embodiments, the 3′ end of the antisense strand core stretch sequence, or the 3′ end of the antisense strand sequence, may include an inverted abasic residue. The chemical structures for inverted abasic deoxyribose residues are shown in Table 11 below.

### MMP7 RNAi Agents

[0084] The MMP7 RNAi agents disclosed herein are designed to target specific positions on a MMP7 gene (e.g., SEQ ID NO:1 (NM_002423.5)). As defined herein, an antisense strand sequence is designed to target a MMP7 gene at a given position on the gene when the 5′ terminal nucleobase of the antisense strand is aligned with a position that is 21 nucleotides downstream (towards the 3′ end) from the position on the gene when base pairing to the gene. For example, as illustrated in Tables 1 and 2 herein, an antisense strand sequence designed to target a MMP7 gene at position 303 requires that when base pairing to the gene, the 5′ terminal nucleobase of the antisense strand is aligned with position 323 of a MMP7 gene.

[0085] As provided herein, a MMP7 RNAi agent does not require that the nucleobase at position 1 (5′→3′) of the antisense strand be complementary to the gene, provided that there is at least 85% complementarity (e.g., at least 85, 86, 87, 88, 89, 90, 91, 92, 93, 94, 95, 96, 97, 98, 99, or 100% complementarity) of the antisense strand and the gene across a core stretch sequence of at least 16 consecutive nucleotides. For example, for a MMP7 RNAi agent disclosed herein that is designed to target position 303 of a MMP7 gene, the 5′ terminal nucleobase of the antisense strand of the of the MMP7 RNAi agent must be aligned with position 323 of the gene; however, the 5′ terminal nucleobase of the antisense strand may be, but is not required to be, complementary to position 323 of a MMP7 gene, provided that there is at least 85% complementarity (e.g., at least 85, 86, 87, 88, 89, 90, 91, 92, 93, 94, 95, 96, 97, 98, 99, or 100% complementarity) of the antisense strand and the gene transcript across a core stretch sequence of at least 16 consecutive nucleotides. As shown by, among other things, the various examples disclosed herein, the specific site of binding of the gene by the antisense strand of the MMP7 RNAi agent (e.g., whether the MMP7 RNAi agent is designed to target a MMP7 gene at position 303, at position 418, at position 971, or at some other position) is an important factor to the level of inhibition achieved by the MMP7 RNAi agent. (See, e.g., Kamola et al., The siRNA Non-seed Region and Its Target Sequences are Auxiliary Determinants of Off-Target Effects, PLOS Computational Biology, 11(12), FIG. 1 (2015)).

[0086] In some embodiments, the MMP7 RNAi agents disclosed herein target a MMP7 gene at or near the positions of the MMP7 sequence shown in Table 1. In some embodiments, the antisense strand of a MMP7 RNAi agent disclosed herein includes a core stretch sequence that is fully, substantially, or at least partially complementary to a target MMP7 19-mer sequence disclosed in Table 1.

TABLE 1
MMP7 19-mer mRNA Target Sequences (taken from homo sapiens matrix
metallopeptidase 7 (MMP7) transcript, GenBank NM_002423.5 (SEQ ID NO: 1))

| | MMP7 19-mer | Corresponding | Targeted Gene |
|---|---|---|---|
| SEQ ID | Target Sequences | Positions of Sequence | Position (as |
| No. | (5′→3′) | on SEQ ID NO: 1 | referred to herein) |
| 2 | AUGUGGAGUGCCAGAUGUU | 305-323 | 303 |
| 3 | GUGGAGUGCCAGAUGUUGC | 307-325 | 305 |
| 4 | UGGAGUGCCAGAUGUUGCA | 308-326 | 306 |
| 5 | GAGUGCCAGAUGUUGCAGA | 310-328 | 308 |
| 6 | AGUGCCAGAUGUUGCAGAA | 311-329 | 309 |
| 7 | GUGCCAGAUGUUGCAGAAU | 312-330 | 310 |
| 8 | UGCCAGAUGUUGCAGAAUA | 313-331 | 311 |
| 9 | CAUUUGAUGGGCCAGGAAA | 550-568 | 548 |
| 10 | UGAUGGGCCAGGAAACACG | 554-572 | 552 |
| 11 | GGCUCAGGACUAUCUCAAG | 149-167 | 147 |
| 12 | CUCAAGAGAUUUUAUCUCU | 162-180 | 160 |
| 13 | AGAGAUUUUAUCUCUAUGA | 166-184 | 164 |
| 14 | GAUUUUAUCUCUAUGACUC | 169-187 | 167 |
| 15 | UGUGGAGUGCCAGAUGUUA | 306-324 | 304 |
| 16 | AGUGCCAGAUGUUGCAGAA | 311-329 | 309 |
| 17 | CAGAUGUUGCAGAAUACUC | 316-334 | 314 |
| 18 | UUGCAGAAUACUCACUAUU | 322-340 | 320 |
| 19 | UGCAGAAUACUCACUAUUU | 323-341 | 321 |
| 20 | UACAGUGGAUCGAUUAGUG | 416-434 | 414 |
| 21 | ACAGUGGAUCGAUUAGUGU | 417-435 | 415 |
| 22 | GUGGAUCGAUUAGUGUCAA | 420-438 | 418 |
| 23 | GAGAUGCUCACUUCGAUGA | 610-628 | 608 |
| 24 | AUUAACUUCCUGUAUGCUA | 663-681 | 661 |
| 25 | AGUGAUGUAUCCAACCUAU | 737-755 | 735 |
| 26 | GUAUCCAACCUAUGGAAAU | 743-461 | 741 |
| 27 | AAGGCAUUCAGAAACUAUA | 802-820 | 800 |
| 28 | GUUGCACAAUCAGAAUUGA | 902-920 | 900 |
| 29 | UUGCACAAUCAGAAUUGAU | 903-921 | 901 |
| 30 | CAAUCAGAAUUGAUAAGCA | 908-926 | 906 |
| 31 | AAUCAGAAUUGAUAAGCAA | 909-927 | 907 |
| 32 | GUCACCCUUUUUUAUUGCA | 955-973 | 953 |
| 33 | GCAGUUGGUUUUUGAAUGU | 971-989 | 969 |
| 34 | AGUUGGUUUUUGAAUGUCU | 973-991 | 971 |
| 35 | GUUGGUUUUUGAAUGUCUU | 974-992 | 972 |
| 36 | CUCCUUUUAAGGAUAAACU | 996-1014 | 994 |

[0087] Homo sapiens matrix metallopeptidase 7 (MMP7), GenBank NM_002423.5 (SEQ ID NO:1), gene transcript (1119 bases):

| | |
|---|---|
| 1 | accaaatcaa ccataggtcc aagaacaatt gtctctggac ggcagctatg cgactcaccg |
| 61 | tgctgtgtgc tgtgtgcctg ctgcctggca gcctggccct gccgctgcct caggaggcgg |
| 121 | gaggcatgag tgagctacag tgggaacagg ctcaggacta tctcaagaga ttttatctct |
| 181 | atgactcaga aacaaaaaat gccaacagtt tagaagccaa actcaaggag atgcaaaaat |
| 241 | tctttggcct acctataact ggaatgttaa actcccgcgt catagaaata atgcagaagc |
| 301 | ccagatgtgg agtgccagat gttgcagaat actcactatt tccaaatagc ccaaaatgga |
| 361 | cttccaaagt ggtcacctac aggatcgtat catatactcg agacttaccg catattacag |
| 421 | tggatcgatt agtgtcaaag gctttaaaca tgtggggcaa agagatcccc ctgcatttca |
| 481 | ggaaagttgt atggggaact gctgacatca tgattggctt tgcgcgagga gctcatgggg |
| 541 | actcctaccc atttgatggg ccaggaaaca cgctggctca tgcctttgcg cctgggacag |
| 601 | gtctcggagg agatgctcac ttcgatgagg atgaacgctg gacggatggt agcagtctag |
| 661 | ggattaactt cctgtatgct gcaactcatg aacttggcca ttctttgggt atgggacatt |
| 721 | cctctgatcc taatgcagtg atgtatccaa cctatggaaa tggagatccc caaaatttta |
| 781 | aactttccca ggatgatatt aaaggcattc agaaactata tggaaagaga agtaattcaa |
| 841 | gaaagaaata gaaacttcag gcagaacatc cattcattca ttcattggat tgtatatcat |
| 901 | tgttgcacaa tcagaattga taagcactgt tcctccactc catttagcaa ttatgtcacc |
| 961 | cttttttatt gcagttggtt tttgaatgtc tttcactcct tttaaggata aactccttta |
| 1021 | tggtgtgact gtgtcttatt catctatact tgcagtgggt agatgtcaat aaatgttaca |
| 1081 | tacacaaata aataaaatgt ttattccatg gtaaattta |

[0088] In some embodiments, a MMP7 RNAi agent includes an antisense strand wherein position 19 of the antisense strand (5′→3′) is capable of forming a base pair with position 1 of a 19-mer target sequence disclosed in Table 1. In some embodiments, a MMP7 agent includes an antisense strand wherein position 1 of the antisense strand (5′→3′) is capable of forming a base pair with position 19 of a 19-mer target sequence disclosed in Table 1.

[0089] In some embodiments, a MMP7 agent includes an antisense strand wherein position 2 of the antisense strand (5′→3′) is capable of forming a base pair with position 18 of a 19-mer target sequence disclosed in Table 1. In some embodiments, a MMP7 agent includes an antisense strand wherein positions 2 through 18 of the antisense strand (5′→3′) are capable of forming base pairs with each of the respective complementary bases located at positions 18 through 2 of the 19-mer target sequence disclosed in Table 1.

[0090] For the RNAi agents disclosed herein, the nucleotide at position 1 of the antisense strand (from 5′ end→3′ end) can be perfectly complementary to a MMP7 gene, or can be non-complementary to a MMP7 gene. In some embodiments, the nucleotide at position 1 of the antisense strand (from 5′ end→3′ end) is a U, A, or dT. In some embodiments, the nucleotide at position 1 of the antisense strand (from 5′ end→3′ end) forms an A:U or U:A base pair with the sense strand.

[0091] In some embodiments, a MMP7 RNAi agent antisense strand comprises the sequence of nucleotides (from 5′ end→3′ end) 2-18 or 2-19 of any of the antisense strand sequences in Table 2 or Table 3. In some embodiments, a MMP7 RNAi sense strand comprises the sequence of nucleotides (from 5′ end→3′ end) 1-17, 1-18, or 2-18 of any of the sense strand sequences in Table 2, Table 4, Table 5, or Table 6.

[0092] In some embodiments, a MMP7 RNAi agent is comprised of (i) an antisense strand comprising the sequence of nucleotides (from 5′ end→3′ end) 2-18 or 2-19 of any of the antisense strand sequences in Table 2 or Table 3, and (ii) a sense strand comprising the sequence of nucleotides (from 5′ end→3′ end) 1-17 or 1-18 of any of the sense strand sequences in Table 2, Table 4, Table 5, or Table 6.

[0093] In some embodiments, the MMP7 RNAi agents include core 19-mer nucleotide sequences shown in the following Table 2.

TABLE 2
MMP7 RNAi Agent Antisense Strand and Sense Strand Core Stretch Base Sequences
(N = any nucleobase; I = inosine (hypoxanthine nucleobase)

| | | | | Corresponding | |
|---|---|---|---|---|---|
| | Antisense Strand Base | | Sense Strand Base | Positions of | |
| | Sequence (5′ → 3′) | | Sequence (5′ → 3′) | Identified | Targeted |
| SEQ ID | (Shown as an Unmodified | SEQ ID | (Shown as an Unmodified | Sequence on | Gene |
| NO:. | Nucleotide Sequence) | NO:. | Nucleotide Sequence) | SEQ ID NO: 1 | Position |
| 37 | AACAUCUGGCACUCCACAU | 187 | AUGUGGAGUGCCAGAUGUU | 305-323 | 303 |
| 38 | UACAUCUGGCACUCCACAU | 188 | AUGUGGAGUGCCAGAUGUA | 305-323 | 303 |
| 39 | NACAUCUGGCACUCCACAU | 189 | AUGUGGAGUGCCAGAUGUN | 305-323 | 303 |
| 40 | NACAUCUGGCACUCCACAN | 190 | NUGUGGAGUGCCAGAUGUN | 305-323 | 303 |
| 41 | UCAACAUCUGGCACUCCAC | 191 | GUGGAGUGCCAGAUGUUGA | 307-325 | 305 |
| 42 | ACAACAUCUGGCACUCCAC | 192 | GUGGAGUGCCAGAUGUUGU | 307-325 | 305 |
| 43 | GCAACAUCUGGCACUCCAC | 193 | GUGGAGUGCCAGAUGUUGC | 307-325 | 305 |
| 44 | NCAACAUCUGGCACUCCAC | 194 | GUGGAGUGCCAGAUGUUGN | 307-325 | 305 |
| 45 | NCAACAUCUGGCACUCCAN | 195 | NUGGAGUGCCAGAUGUUGN | 307-325 | 305 |
| 46 | UGCAACAUCUGGCACUCCA | 196 | UGGAGUGCCAGAUGUUGCA | 308-326 | 306 |
| 47 | AGCAACAUCUGGCACUCCA | 197 | UGGAGUGCCAGAUGUUGCU | 308-326 | 306 |
| 48 | NGCAACAUCUGGCACUCCA | 198 | UGGAGUGCCAGAUGUUGCN | 308-326 | 306 |
| 49 | NGCAACAUCUGGCACUCCN | 199 | NGGAGUGCCAGAUGUUGCN | 308-326 | 306 |
| 50 | UCUGCAACAUCUGGCACUC | 200 | GAGUGCCAGAUGUUGCAGA | 310-328 | 308 |
| 51 | ACUGCAACAUCUGGCACUC | 201 | GAGUGCCAGAUGUUGCAGU | 310-328 | 308 |
| 52 | NCUGCAACAUCUGGCACUC | 202 | GAGUGCCAGAUGUUGCAGN | 310-328 | 308 |
| 53 | NCUGCAACAUCUGGCACUN | 203 | NAGUGCCAGAUGUUGCAGN | 310-328 | 308 |
| 54 | UUCUGCAACAUCUGGCACU | 204 | AGUGCCAGAUGUUGCAGAA | 311-329 | 309 |
| 55 | AUCUGCAACAUCUGGCACU | 205 | AGUGCCAGAUGUUGCAGAU | 311-329 | 309 |
| 56 | NUCUGCAACAUCUGGCACU | 206 | AGUGCCAGAUGUUGCAGAN | 311-329 | 309 |
| 57 | NUCUGCAACAUCUGGCACN | 207 | NGUGCCAGAUGUUGCAGAN | 311-329 | 309 |
| 58 | AUUCUGCAACAUCUGGCAC | 208 | GUGCCAGAUGUUGCAGAAU | 312-330 | 310 |
| 59 | UUUCUGCAACAUCUGGCAC | 209 | GUGCCAGAUGUUGCAGAAA | 312-330 | 310 |
| 60 | NUUCUGCAACAUCUGGCAC | 210 | GUGCCAGAUGUUGCAGAAN | 312-330 | 310 |
| 61 | NUUCUGCAACAUCUGGCAN | 211 | NUGCCAGAUGUUGCAGAAN | 312-330 | 310 |
| 62 | UAUUCUGCAACAUCUGGCA | 212 | UGCCAGAUGUUGCAGAAUA | 313-331 | 311 |
| 63 | AAUUCUGCAACAUCUGGCA | 213 | UGCCAGAUGUUGCAGAAUU | 313-331 | 311 |
| 64 | NAUUCUGCAACAUCUGGCA | 214 | UGCCAGAUGUUGCAGAAUN | 313-331 | 311 |
| 65 | NAUUCUGCAACAUCUGGCN | 215 | NGCCAGAUGUUGCAGAAUN | 313-331 | 311 |
| 66 | UUUCCUGGCCCAUCAAAUG | 216 | CAUUUGAUGGGCCAGGAAA | 550-568 | 548 |
| 67 | AUUCCUGGCCCAUCAAAUG | 217 | CAUUUGAUGGGCCAGGAAU | 550-568 | 548 |
| 68 | NUUCCUGGCCCAUCAAAUG | 218 | CAUUUGAUGGGCCAGGAAN | 550-568 | 548 |
| 69 | NUUCCUGGCCCAUCAAAUN | 219 | NAUUUGAUGGGCCAGGAAN | 550-568 | 548 |
| 70 | UGUGUUUCCUGGCCCAUCA | 220 | UGAUGGGCCAGGAAACACA | 554-572 | 552 |
| 71 | AGUGUUUCCUGGCCCAUCA | 221 | UGAUGGGCCAGGAAACACU | 554-572 | 552 |
| 72 | CGUGUUUCCUGGCCCAUCA | 222 | UGAUGGGCCAGGAAACACG | 554-572 | 552 |
| 73 | NGUGUUUCCUGGCCCAUCA | 223 | UGAUGGGCCAGGAAACACN | 554-572 | 552 |
| 74 | NGUGUUUCCUGGCCCAUCN | 224 | NGAUGGGCCAGGAAACACN | 554-572 | 552 |
| 75 | UUUGAGAUAGUCCUGAGCC | 225 | GGCUCAGGACUAUCUCAAA | 149-167 | 147 |
| 76 | AUUGAGAUAGUCCUGAGCC | 226 | GGCUCAGGACUAUCUCAAU | 149-167 | 147 |
| 77 | CUUGAGAUAGUCCUGAGCC | 227 | GGCUCAGGACUAUCUCAAG | 149-167 | 147 |
| 78 | NUUGAGAUAGUCCUGAGCC | 228 | GGCUCAGGACUAUCUCAAN | 149-167 | 147 |
| 79 | NUUGAGAUAGUCCUGAGCN | 229 | NGCUCAGGACUAUCUCAAN | 149-167 | 147 |
| 80 | AGAGAUAAAAUCUCUUGAG | 230 | CUCAAGAGAUUUUAUCUCU | 162-180 | 160 |
| 81 | UGAGAUAAAAUCUCUUGAG | 231 | CUCAAGAGAUUUUAUCUCA | 162-180 | 160 |
| 82 | NGAGAUAAAAUCUCUUGAG | 232 | CUCAAGAGAUUUUAUCUCN | 162-180 | 160 |
| 83 | NGAGAUAAAAUCUCUUGAN | 233 | NUCAAGAGAUUUUAUCUCN | 162-180 | 160 |
| 84 | UCAUAGAGAUAAAAUCUCU | 234 | AGAGAUUUUAUCUCUAUGA | 166-184 | 164 |
| 85 | ACAUAGAGAUAAAAUCUCU | 235 | AGAGAUUUUAUCUCUAUGU | 166-184 | 164 |
| 86 | NCAUAGAGAUAAAAUCUCU | 236 | AGAGAUUUUAUCUCUAUGN | 166-184 | 164 |
| 87 | NCAUAGAGAUAAAAUCUCN | 237 | NGAGAUUUUAUCUCUAUGN | 166-184 | 164 |
| 88 | UAGUCAUAGAGAUAAAAUC | 238 | GAUUUUAUCUCUAUGACUA | 169-187 | 167 |
| 89 | AAGUCAUAGAGAUAAAAUC | 239 | GAUUUUAUCUCUAUGACUU | 169-187 | 167 |
| 90 | GAGUCAUAGAGAUAAAAUC | 240 | GAUUUUAUCUCUAUGACUC | 169-187 | 167 |
| 91 | NAGUCAUAGAGAUAAAAUC | 241 | GAUUUUAUCUCUAUGACUN | 169-187 | 167 |
| 92 | NAGUCAUAGAGAUAAAAUN | 242 | NAUUUUAUCUCUAUGACUN | 169-187 | 167 |
| 93 | UAACAUCUGGCACUCCACA | 243 | UGUGGAGUGCCAGAUGUUA | 306-324 | 304 |
| 94 | AAACAUCUGGCACUCCACA | 244 | UGUGGAGUGCCAGAUGUUU | 306-324 | 304 |
| 95 | NAACAUCUGGCACUCCACA | 245 | UGUGGAGUGCCAGAUGUUN | 306-324 | 304 |
| 96 | NAACAUCUGGCACUCCACN | 246 | NGUGGAGUGCCAGAUGUUN | 306-324 | 304 |
| 97 | UUCUGCAACAUCUGGCACU | 247 | AGUGCCAGAUGUUGCAGAA | 311-329 | 309 |
| 98 | AUCUGCAACAUCUGGCACU | 248 | AGUGCCAGAUGUUGCAGAU | 311-329 | 309 |
| 99 | NUCUGCAACAUCUGGCACU | 249 | AGUGCCAGAUGUUGCAGAN | 311-329 | 309 |
| 100 | NUCUGCAACAUCUGGCACN | 250 | NGUGCCAGAUGUUGCAGAN | 311-329 | 309 |
| 101 | UAGUAUUCUGCAACAUCUG | 251 | CAGAUGUUGCAGAAUACUA | 316-334 | 314 |
| 102 | AAGUAUUCUGCAACAUCUG | 252 | CAGAUGUUGCAGAAUACUU | 316-334 | 314 |
| 103 | GAGUAUUCUGCAACAUCUG | 253 | CAGAUGUUGCAGAAUACUC | 316-334 | 314 |
| 104 | NAGUAUUCUGCAACAUCUG | 254 | CAGAUGUUGCAGAAUACUN | 316-334 | 314 |
| 105 | NAGUAUUCUGCAACAUCUN | 255 | NAGAUGUUGCAGAAUACUN | 316-334 | 314 |
| 106 | AAUAGUGAGUAUUCUGCAA | 256 | UUGCAGAAUACUCACUAUU | 322-340 | 320 |
| 107 | UAUAGUGAGUAUUCUGCAA | 257 | UUGCAGAAUACUCACUAUA | 322-340 | 320 |
| 108 | NAUAGUGAGUAUUCUGCAA | 258 | UUGCAGAAUACUCACUAUN | 322-340 | 320 |
| 109 | NAUAGUGAGUAUUCUGCAN | 259 | NUGCAGAAUACUCACUAUN | 322-340 | 320 |
| 110 | AAAUAGUGAGUAUUCUGCA | 260 | UGCAGAAUACUCACUAUUU | 323-341 | 321 |
| 111 | UAAUAGUGAGUAUUCUGCA | 261 | UGCAGAAUACUCACUAUUA | 323-341 | 321 |
| 112 | NAAUAGUGAGUAUUCUGCA | 262 | UGCAGAAUACUCACUAUUN | 323-341 | 321 |
| 113 | NAAUAGUGAGUAUUCUGCN | 263 | NGCAGAAUACUCACUAUUN | 323-341 | 321 |
| 114 | UACUAAUCGAUCCACUGUA | 264 | UACAGUGGAUCGAUUAGUA | 416-434 | 414 |
| 115 | AACUAAUCGAUCCACUGUA | 265 | UACAGUGGAUCGAUUAGUU | 416-434 | 414 |
| 116 | CACUAAUCGAUCCACUGUA | 266 | UACAGUGGAUCGAUUAGUG | 416-434 | 414 |
| 117 | NACUAAUCGAUCCACUGUA | 267 | UACAGUGGAUCGAUUAGUN | 416-434 | 414 |
| 118 | NACUAAUCGAUCCACUGUN | 268 | NACAGUGGAUCGAUUAGUN | 416-434 | 414 |
| 119 | ACACUAAUCGAUCCACUGU | 269 | ACAGUGGAUCGAUUAGUGU | 417-435 | 415 |
| 120 | UCACUAAUCGAUCCACUGU | 270 | ACAGUGGAUCGAUUAGUGA | 417-435 | 415 |
| 121 | NCACUAAUCGAUCCACUGU | 271 | ACAGUGGAUCGAUUAGUGN | 417-435 | 415 |
| 122 | NCACUAAUCGAUCCACUGN | 272 | NCAGUGGAUCGAUUAGUGN | 417-435 | 415 |
| 123 | UUGACACUAAUCGAUCCAC | 273 | GUGGAUCGAUUAGUGUCAA | 420-438 | 418 |
| 124 | AUGACACUAAUCGAUCCAC | 274 | GUGGAUCGAUUAGUGUCAU | 420-438 | 418 |
| 125 | NUGACACUAAUCGAUCCAC | 275 | GUGGAUCGAUUAGUGUCAN | 420-438 | 418 |
| 126 | NUGACACUAAUCGAUCCAN | 276 | NUGGAUCGAUUAGUGUCAN | 420-438 | 418 |
| 123 | UUGACACUAAUCGAUCCAC | 277 | GUGGAUCGAUUAGUIUCAA | 420-438 | 418 |
| 128 | AUGACACUAAUCGAUCCAC | 278 | GUGGAUCGAUUAGUIUCAU | 420-438 | 418 |
| 129 | NUGACACUAAUCGAUCCAC | 279 | GUGGAUCGAUUAGUIUCAN | 420-438 | 418 |
| 130 | NUGACACUAAUCGAUCCAN | 280 | NUGGAUCGAUUAGUIUCAN | 420-438 | 418 |
| 131 | UCAUCGAAGUGAGCAUCUC | 281 | GAGAUGCUCACUUCGAUGA | 610-628 | 608 |
| 132 | ACAUCGAAGUGAGCAUCUC | 282 | GAGAUGCUCACUUCGAUGU | 610-628 | 608 |
| 133 | NCAUCGAAGUGAGCAUCUC | 283 | GAGAUGCUCACUUCGAUGN | 610-628 | 608 |
| 134 | NCAUCGAAGUGAGCAUCUN | 284 | NAGAUGCUCACUUCGAUGN | 610-628 | 608 |
| 135 | UAGCAUACAGGAAGUUAAU | 285 | AUUAACUUCCUGUAUGCUA | 663-681 | 661 |
| 136 | AAGCAUACAGGAAGUUAAU | 286 | AUUAACUUCCUGUAUGCUU | 663-681 | 661 |
| 137 | NAGCAUACAGGAAGUUAAU | 287 | AUUAACUUCCUGUAUGCUN | 663-681 | 661 |
| 138 | NAGCAUACAGGAAGUUAAN | 288 | NUUAACUUCCUGUAUGCUN | 663-681 | 661 |
| 139 | AUAGGUUGGAUACAUCACU | 289 | AGUGAUGUAUCCAACCUAU | 737-755 | 735 |
| 140 | UUAGGUUGGAUACAUCACU | 290 | AGUGAUGUAUCCAACCUAA | 737-755 | 735 |
| 141 | NUAGGUUGGAUACAUCACU | 291 | AGUGAUGUAUCCAACCUAN | 737-755 | 735 |
| 142 | NUAGGUUGGAUACAUCACN | 292 | NGUGAUGUAUCCAACCUAN | 737-755 | 735 |
| 143 | AUUUCCAUAGGUUGGAUAC | 293 | GUAUCCAACCUAUGGAAAU | 743-461 | 741 |
| 144 | UUUUCCAUAGGUUGGAUAC | 294 | GUAUCCAACCUAUGGAAAA | 743-461 | 741 |
| 145 | NUUUCCAUAGGUUGGAUAC | 295 | GUAUCCAACCUAUGGAAAN | 743-461 | 741 |
| 146 | NUUUCCAUAGGUUGGAUAN | 296 | NUAUCCAACCUAUGGAAAN | 743-461 | 741 |
| 147 | UAUAGUUUCUGAAUGCCUU | 297 | AAGGCAUUCAGAAACUAUA | 802-820 | 800 |
| 148 | AAUAGUUUCUGAAUGCCUU | 298 | AAGGCAUUCAGAAACUAUU | 802-820 | 800 |
| 149 | NAUAGUUUCUGAAUGCCUU | 299 | AAGGCAUUCAGAAACUAUN | 802-820 | 800 |
| 150 | NAUAGUUUCUGAAUGCCUN | 300 | NAGGCAUUCAGAAACUAUN | 802-820 | 800 |
| 151 | UCAAUUCUGAUUGUGCAAC | 301 | GUUGCACAAUCAGAAUUGA | 902-920 | 900 |
| 152 | ACAAUUCUGAUUGUGCAAC | 302 | GUUGCACAAUCAGAAUUGU | 902-920 | 900 |
| 153 | NCAAUUCUGAUUGUGCAAC | 303 | GUUGCACAAUCAGAAUUGN | 902-920 | 900 |
| 154 | NCAAUUCUGAUUGUGCAAN | 304 | NUUGCACAAUCAGAAUUGN | 902-920 | 900 |
| 155 | AUCAAUUCUGAUUGUGCAA | 305 | UUGCACAAUCAGAAUUGAU | 903-921 | 901 |
| 156 | UUCAAUUCUGAUUGUGCAA | 306 | UUGCACAAUCAGAAUUGAA | 903-921 | 901 |
| 157 | NUCAAUUCUGAUUGUGCAA | 307 | UUGCACAAUCAGAAUUGAN | 903-921 | 901 |
| 158 | NUCAAUUCUGAUUGUGCAN | 308 | NUGCACAAUCAGAAUUGAN | 903-921 | 901 |
| 159 | UGCUUAUCAAUUCUGAUUG | 309 | CAAUCAGAAUUGAUAAGCA | 908-926 | 906 |
| 160 | AGCUUAUCAAUUCUGAUUG | 310 | CAAUCAGAAUUGAUAAGCU | 908-926 | 906 |
| 161 | NGCUUAUCAAUUCUGAUUG | 311 | CAAUCAGAAUUGAUAAGCN | 908-926 | 906 |
| 162 | NGCUUAUCAAUUCUGAUUN | 312 | NAAUCAGAAUUGAUAAGCN | 908-926 | 906 |
| 163 | UUGCUUAUCAAUUCUGAUU | 313 | AAUCAGAAUUGAUAAGCAA | 909-927 | 907 |
| 164 | AUGCUUAUCAAUUCUGAUU | 314 | AAUCAGAAUUGAUAAGCAU | 909-927 | 907 |
| 165 | NUGCUUAUCAAUUCUGAUU | 315 | AAUCAGAAUUGAUAAGCAN | 909-927 | 907 |
| 166 | NUGCUUAUCAAUUCUGAUN | 316 | NAUCAGAAUUGAUAAGCAN | 909-927 | 907 |
| 167 | UGCAAUAAAAAAGGGUGAC | 317 | GUCACCCUUUUUUAUUGCA | 955-973 | 953 |
| 168 | AGCAAUAAAAAAGGGUGAC | 318 | GUCACCCUUUUUUAUUGCU | 955-973 | 953 |
| 169 | NGCAAUAAAAAAGGGUGAC | 319 | GUCACCCUUUUUUAUUGCN | 955-973 | 953 |
| 170 | NGCAAUAAAAAAGGGUGAN | 320 | NUCACCCUUUUUUAUUGCN | 955-973 | 953 |
| 171 | ACAUUCAAAAACCAACUGC | 321 | GCAGUUGGUUUUUGAAUGU | 971-989 | 969 |
| 172 | UCAUUCAAAAACCAACUGC | 322 | GCAGUUGGUUUUUGAAUGA | 971-989 | 969 |
| 173 | NCAUUCAAAAACCAACUGC | 323 | GCAGUUGGUUUUUGAAUGN | 971-989 | 969 |
| 174 | NCAUUCAAAAACCAACUGN | 324 | NCAGUUGGUUUUUGAAUGN | 971-989 | 969 |
| 175 | AGACAUUCAAAAACCAACU | 325 | AGUUGGUUUUUGAAUGUCU | 973-991 | 971 |
| 176 | UGACAUUCAAAAACCAACU | 326 | AGUUGGUUUUUGAAUGUCA | 973-991 | 971 |
| 177 | NGACAUUCAAAAACCAACU | 327 | AGUUGGUUUUUGAAUGUCN | 973-991 | 971 |
| 178 | NGACAUUCAAAAACCAACN | 328 | NGUUGGUUUUUGAAUGUCN | 973-991 | 971 |
| 179 | AAGACAUUCAAAAACCAAC | 329 | GUUGGUUUUUGAAUGUCUU | 974-992 | 972 |
| 180 | UAGACAUUCAAAAACCAAC | 330 | GUUGGUUUUUGAAUGUCUA | 974-992 | 972 |
| 181 | NAGACAUUCAAAAACCAAC | 331 | GUUGGUUUUUGAAUGUCUN | 974-992 | 972 |
| 182 | NAGACAUUCAAAAACCAAN | 332 | NUUGGUUUUUGAAUGUCUN | 974-992 | 972 |
| 183 | AGUUUAUCCUUAAAAGGAG | 333 | CUCCUUUUAAGGAUAAACU | 996-1014 | 994 |
| 184 | UGUUUAUCCUUAAAAGGAG | 334 | CUCCUUUUAAGGAUAAACA | 996-1014 | 994 |
| 185 | NGUUUAUCCUUAAAAGGAG | 335 | CUCCUUUUAAGGAUAAACN | 996-1014 | 994 |
| 186 | NGUUUAUCCUUAAAAGGAN | 336 | NUCCUUUUAAGGAUAAACN | 996-1014 | 994 |

[0094] The MMP7 RNAi agent sense strands and antisense strands that comprise or consist of the nucleotide sequences in Table 2 can be modified nucleotides or unmodified nucleotides. In some embodiments, the MMP7 RNAi agents having the sense and antisense strand sequences that comprise or consist of any of the nucleotide sequences in Table 2 are all or substantially all modified nucleotides.

[0095] In some embodiments, the antisense strand of a MMP7 RNAi agent disclosed herein differs by 0, 1, 2, or 3 nucleotides from any of the antisense strand sequences in Table 2. In some embodiments, the sense strand of a MMP7 RNAi agent disclosed herein differs by 0, 1, 2, or 3 nucleotides from any of the sense strand sequences in Table 2.

[0096] As used herein, each N listed in a sequence disclosed in Table 2 may be independently selected from any and all nucleobases (including those found on both modified and unmodified nucleotides). In some embodiments, an N nucleotide listed in a sequence disclosed in Table 2 has a nucleobase that is complementary to the N nucleotide at the corresponding position on the other strand. In some embodiments, an N nucleotide listed in a sequence disclosed in Table 2 has a nucleobase that is not complementary to the N nucleotide at the corresponding position on the other strand. In some embodiments, an N nucleotide listed in a sequence disclosed in Table 2 has a nucleobase that is the same as the N nucleotide at the corresponding position on the other strand. In some embodiments, an N nucleotide listed in a sequence disclosed in Table 2 has a nucleobase that is different from the N nucleotide at the corresponding position on the other strand.

[0097] Certain modified MMP7 RNAi agent sense and antisense strands are provided in Table 3, Table 4, Table 5, Table 6, and Table 10. Certain modified MMP7 RNAi agent antisense strands, as well as their underlying unmodified nucleobase sequences, are provided in Table 3. Certain modified MMP7 RNAi agent sense strands, as well as their underlying unmodified nucleobase sequences, are provided in Tables 4, 5, and 6. In forming MMP7 RNAi agents, each of the nucleotides in each of the underlying base sequences listed in Tables 3, 4, 5, and 6, as well as in Table 2, above, can be a modified nucleotide.

[0098] The MMP7 RNAi agents described herein are formed by annealing an antisense strand with a sense strand. A sense strand containing a sequence listed in Table 2, Table 4, Table 5, or Table 6 can be hybridized to any antisense strand containing a sequence listed in Table 2 or Table 3, provided the two sequences have a region of at least 85% complementarity over a contiguous 16, 17, 18, 19, 20, or 21 nucleotide sequence.

[0099] In some embodiments, a MMP7 RNAi agent antisense strand comprises a nucleotide sequence of any of the sequences in Table 2 or Table 3.

[0100] In some embodiments, a MMP7 RNAi agent comprises or consists of a duplex having the nucleobase sequences of the sense strand and the antisense strand of any of the sequences in Table 2, Table 3, Table 4, Table 5, Table 6, or Table 10.

[0101] Examples of antisense strands containing modified nucleotides are provided in Table 3. Examples of sense strands containing modified nucleotides are provided in Tables 4, 5 and 6.

[0102] As used in Tables 3, 4, 5, 6, and 10, the following notations are used to indicate modified nucleotides, targeting groups, and linking groups:
[0103] A=adenosine-3′-phosphate
[0104] C=cytidine-3′-phosphate
[0105] G=guanosine-3′-phosphate
[0106] U=uridine-3′-phosphate
[0107] I=inosine-3′-phosphate
[0108] a=2′-O-methyladenosine-3′-phosphate
[0109] as =2′-O-methyladenosine-3′-phosphorothioate
[0110] c=2′-O-methylcytidine-3′-phosphate
[0111] cs=2′-O-methylcytidine-3′-phosphorothioate
[0112] g=2′-O-methylguanosine-3′-phosphate
[0113] gs=2′-O-methylguanosine-3′-phosphorothioate
[0114] i=2′-O-methylinosine-3′-phosphate
[0115] is =2′-O-methylinosine-3′-phosphorothioate
[0116] t=2′-O-methyl-5-methyluridine-3′-phosphate
[0117] ts=2′-O-methyl-5-methyluridine-3′-phosphorothioate
[0118] u=2′-O-methyluridine-3′-phosphate
[0119] us=2′-O-methyluridine-3′-phosphorothioate
[0120] Af=2′-fluoroadenosine-3′-phosphate
[0121] Afs=2′-fluoroadenosine-3′-phosporothioate
[0122] Cf=2′-fluorocytidine-3′-phosphate
[0123] Cfs=2′-fluorocytidine-3′-phosphorothioate
[0124] Gf=2′-fluoroguanosine-3′-phosphate
[0125] Gfs=2′-fluoroguanosine-3′-phosphorothioate
[0126] Tf=2′-fluoro-5′-methyluridine-3′-phosphate
[0127] Tfs=2′-fluoro-5′-methyluridine-3′-phosphorothioate
[0128] Uf=2′-fluorouridine-3′-phosphate
[0129] Ufs=2′-fluorouridine-3′-phosphorothioate
[0130] dT=2′-deoxythymidine-3′-phosphate
[0131] A_{UNA}=2′,3′-seco-adenosine-3′-phosphate
[0132] A_{UNAS}=2′,3′-seco-adenosine-3′-phosphorothioate
[0133] C_{UNA}=2′,3′-seco-cytidine-3′-phosphate
[0134] C_{UNAS}=2′,3′-seco-cytidine-3′-phosphorothioate
[0135] G_{UNA}=2′,3′-seco-guanosine-3′-phosphate
[0136] G_{UNAS}=2′,3′-seco-guanosine-3′-phosphorothioate
[0137] U_{UNA}=2′,3′-seco-uridine-3′-phosphate
[0138] U_{UNAS}=2′,3′-seco-uridine-3′-phosphorothioate
[0139] a_2N=see Table 11
[0140] a_2Ns=see Table 11
[0141] (invAb)=inverted abasic deoxyribonucleotide-5′-phosphate, see Table 11
[0142] (invAb)s=inverted abasic deoxyribonucleotide-5′-phosphorothioate, see Table 11
[0143] s=phosphorothioate linkage
[0144] p=terminal phosphate (as synthesized)
[0145] vpdN=vinyl phosphonate deoxyribonucleotide
[0146] cPrpa=5′-cyclopropyl phosphonate-2′-O-methyladenosine-3′-phosphate (see Table 11)
[0147] cPrpas=5′-cyclopropyl phosphonate-2′-O-methyladenosine-3′-phosphorothioate (see Table 11)
[0148] cPrpu=5′-cyclopropyl phosphonate-2′-O-methyluridine-3′-phosphate (see Table 11)
[0149] cPrpus=5′-cyclopropyl phosphonate-2′-O-methyluridine-3′-phosphorothioate (see Table 11)
[0150] (Alk-SS-C6)=see Table 11
[0151] (C6-SS-Alk)=see Table 11
[0152] (C6-SS-C6)=see Table 11
[0153] (6-SS-6)=see Table 11
[0154] (C6-SS-Alk-Me)=see Table 11
[0155] (NH2-C6)=see Table 11
[0156] (TriAlk14)=see Table 11
[0157] (TriAlk14)s=see Table 11
[0158] -C6-=see Table 11
[0159] -C6s-=see Table 11
[0160] -L6-C6-=see Table 11
[0161] -L6-C6s-=see Table 11
[0162] -Alk-cyHex-=see Table 11
[0163] Alk-cyHexs-=see Table 11
[0164] (TA14)=see Table 11 (structure of (TriAlk14)s after conjugation)
[0165] (TA14)s=see Table 11 (structure of (TriAlk14)s after conjugation)

[0166] As the person of ordinary skill in the art would readily understand, unless otherwise indicated by the sequence (such as, for example, by a phosphorothioate linkage “s”), when present in an oligonucleotide, the nucleotide monomers are mutually linked by 5′-3′-phosphodiester bonds. As the person of ordinary skill in the art would clearly understand, the inclusion of a phosphorothioate linkage as shown in the modified nucleotide sequences disclosed herein replaces the phosphodiester linkage typically present in oligonucleotides. Further, the person of ordinary skill in the art would readily understand that the terminal nucleotide at the 3′ end of a given oligonucleotide sequence would typically have a hydroxyl (—OH) group at the respective 3′ position of the given monomer instead of a phosphate moiety ex vivo. Additionally, for the embodiments disclosed herein, when viewing the respective strand 5′→3′, the inverted abasic residues are inserted such that the 3′ position of the deoxyribose is linked at the 3′ end of the preceding monomer on the respective strand (see, e.g., Table 11). Moreover, as the person of ordinary skill would readily understand and appreciate, while the phosphorothioate chemical structures depicted herein typically show the anion on the sulfur atom, the inventions disclosed herein encompass all phosphorothioate tautomers (e.g., where the sulfur atom has a double-bond and the anion is on an oxygen atom). Unless expressly indicated otherwise herein, such understandings of the person of ordinary skill in the art are used when describing the MMP7 RNAi agents and compositions of MMP7 RNAi agents disclosed herein.

[0167] Certain examples of targeting groups and linking groups used with the MMP7 RNAi agents disclosed herein are included in the chemical structures provided below in Table 11. Each sense strand and/or antisense strand can have any targeting groups or linking groups listed herein, as well as other targeting or linking groups, conjugated to the 5′ and/or 3′ end of the sequence.

TABLE 3
MMP7 RNAi Agent Antisense Strand Sequences

| | | | Underlying Base | |
|---|---|---|---|---|
| | | | Sequence (5′ → 3′) | |
| AS | Modified Antisense | SEQ ID | (Shown as an Unmodified | SEQ ID |
| Strand ID | Strand (5′ → 3′) | NO. | Nucleotide Sequence) | NO. |
| AM08523-AS | asAfscsAfuCfuGfgCfaCfuCfcAfcAfuCfsu | 337 | AACAUCUGGCACUCCACAUCU | 629 |
| AM08525-AS | asAfscsAfuCfuGfgCfaCfuCfcAfcAfuCfsg | 338 | AACAUCUGGCACUCCACAUCG | 630 |
| AM08527-AS | usCfsasAfcAfuCfuGfgCfaCfuCfcAfcAfsu | 339 | UCAACAUCUGGCACUCCACAU | 631 |
| AM08529-AS | usCfsasAfcAfuCfuGfgCfaCfuCfcAfcAfsg | 340 | UCAACAUCUGGCACUCCACAG | 632 |
| AM08531-AS | usGfscsAfaCfaUfcUfgGfcAfcUfcCfaCfsa | 341 | UGCAACAUCUGGCACUCCACA | 633 |
| AM08533-AS | usGfscsAfaCfaUfcUfgGfcAfcUfcCfaCfsg | 342 | UGCAACAUCUGGCACUCCACG | 634 |
| AM08535-AS | usCfsusGfcAfaCfaUfcUfgGfcAfcUfcCfsa | 343 | UCUGCAACAUCUGGCACUCCA | 635 |
| AM08537-AS | usCfsusGfcAfaCfaUfcUfgGfcAfcUfcCfsg | 344 | UCUGCAACAUCUGGCACUCCG | 636 |
| AM08539-AS | usUfscsUfgCfaAfcAfuCfuGfgCfaCfuCfsc | 345 | UUCUGCAACAUCUGGCACUCC | 637 |
| AM08541-AS | asUfsusCfuGfcAfaCfaUfcUfgGfcAfcUfsc | 346 | AUUCUGCAACAUCUGGCACUC | 638 |
| AM08543-AS | usAfsusUfcUfgCfaAfcAfuCfuGfgCfaCfsu | 347 | UAUUCUGCAACAUCUGGCACU | 639 |
| AM08545-AS | usAfsusUfcUfgCfaAfcAfuCfuGfgCfaCfsg | 348 | UAUUCUGCAACAUCUGGCACG | 640 |
| AM08547-AS | usUfsusCfcUfgGfcCfcAfuCfaAfaUfgGfsg | 349 | UUUCCUGGCCCAUCAAAUGGG | 641 |
| AM08549-AS | usGfsusGfuUfuCfcUfgGfcCfcAfuCfaAfsg | 350 | UGUGUUUCCUGGCCCAUCAAG | 642 |
| AM08789-AS | usCfsusUfcUfuUfgUfuUfuAfgAfgUfcGfsu | 351 | UCUUCUUUGUUUUAGAGUCGU | 643 |
| AM08791-AS | asAfsgsAfaCfuUfcUfgCfaUfuUfcCfcUfsc | 352 | AAGAACUUCUGCAUUUCCCUC | 644 |
| AM08793-AS | usUfsgsAfuCfuAfcUfaAfgAfaCfcGfaGfsg | 353 | UUGAUCUACUAAGAACCGAGG | 645 |
| AM08797-AS | asCfsasAfaCfaGfgAfaGfuUfcAfcUfcCfsu | 354 | ACAAACAGGAAGUUCACUCCU | 646 |
| AM08801-AS | usAfscsAfgUfaCfaAfgGfaAfgAfaAfgGfsa | 355 | UACAGUACAAGGAAGAAAGGA | 647 |
| AM08803-AS | usGfsasCfaUfuUfaUfuGfcUfgGfuGfuCfsu | 356 | UGACAUUUAUUGCUGGUGUCU | 648 |
| AM08805-AS | usGfsasCfaUfuUfaUfuGfcUfgGfuGfuCfsg | 357 | UGACAUUUAUUGCUGGUGUCG | 649 |
| AM08807-AS | usGfsasCfaUfuUfaUfuGfcUfgAfuGfuCfsg | 358 | UGACAUUUAUUGCUGAUGUCG | 650 |
| AM12367-AS | usUfsusGfaGfaUfaGfuCfcUfgAfgCfcUfsg | 359 | UUUGAGAUAGUCCUGAGCCUG | 651 |
| AM12369-AS | asGfsasGfaUfaAfaAfuCfuCfuUfgAfgAfsc | 360 | AGAGAUAAAAUCUCUUGAGAC | 652 |
| AM12371-AS | usCfsasUfaGfaGfaUfaAfaAfuCfuCfuUfsg | 361 | UCAUAGAGAUAAAAUCUCUUG | 653 |
| AM12373-AS | usAfsgsUfcAfuAfgAfgAfuAfaAfaUfcUfsc | 362 | UAGUCAUAGAGAUAAAAUCUC | 654 |
| AM12375-AS | usAfsasCfaUfcUfgGfcAfcUfcCfaCfaUfsc | 363 | UAACAUCUGGCACUCCACAUC | 655 |
| AM12378-AS | usAfsgsUfaUfuCfuGfcAfaCfaUfcUfgGfsc | 364 | UAGUAUUCUGCAACAUCUGGC | 656 |
| AM12380-AS | asAfsusAfgUfgAfgUfaUfuCfuGfcAfaCfsc | 365 | AAUAGUGAGUAUUCUGCAACC | 657 |
| AM12382-AS | asAfsasUfaGfuGfaGfuAfuUfcUfgCfaAfsc | 366 | AAAUAGUGAGUAUUCUGCAAC | 658 |
| AM12384-AS | usAfscsUfaAfuCfgAfuCfcAfcUfgUfaAfsc | 367 | UACUAAUCGAUCCACUGUAAC | 659 |
| AM12386-AS | asCfsasCfuAfaUfcGfaUfcCfaCfuGfuAfsc | 368 | ACACUAAUCGAUCCACUGUAC | 660 |
| AM12388-AS | usUfsgsAfcAfcUfaAfuCfgAfuCfcAfcUfsg | 369 | UUGACACUAAUCGAUCCACUG | 661 |
| AM12390-AS | usCfsasUfcGfaAfgUfgAfgCfaUfcUfcCfsu | 370 | UCAUCGAAGUGAGCAUCUCCU | 662 |
| AM12392-AS | usAfsgsCfaUfaCfaGfgAfaGfuUfaAfuCfsc | 371 | UAGCAUACAGGAAGUUAAUCC | 663 |
| AM12394-AS | asUfsasGfgUfuGfgAfuAfcAfuCfaCfuGfsc | 372 | AUAGGUUGGAUACAUCACUGC | 664 |
| AM12396-AS | asUfsusUfcCfaUfaGfgUfuGfgAfuAfcAfsc | 373 | AUUUCCAUAGGUUGGAUACAC | 665 |
| AM12398-AS | usCfscsUfuUfaAfuAfuCfaUfcCfuGfgGfsa | 374 | UCCUUUAAUAUCAUCCUGGGA | 666 |
| AM12400-AS | usAfsusAfgUfuUfcUfgAfaUfgCfcUfuUfsc | 375 | UAUAGUUUCUGAAUGCCUUUC | 667 |
| AM12402-AS | usCfsasAfuUfcUfgAfuUfgUfgCfaAfcAfsc | 376 | UCAAUUCUGAUUGUGCAACAC | 668 |
| AM12404-AS | asUfscsAfaUfuCfuGfaUfuGfuGfcAfaCfsc | 377 | AUCAAUUCUGAUUGUGCAACC | 669 |
| AM12406-AS | usGfscsUfuAfuCfaAfuUfcUfgAfuUfgUfsg | 378 | UGCUUAUCAAUUCUGAUUGUG | 670 |
| AM12408-AS | usUfsgsCfuUfaUfcAfaUfuCfuGfaUfuGfsc | 379 | UUGCUUAUCAAUUCUGAUUGC | 671 |
| AM12410-AS | usGfscsAfaUfaAfaAfaAfgGfgUfgAfcAfsc | 380 | UGCAAUAAAAAAGGGUGACAC | 672 |
| AM12412-AS | asCfsasUfuCfaAfaAfaCfcAfaCfuGfcAfsc | 381 | ACAUUCAAAAACCAACUGCAC | 673 |
| AM12414-AS | asGfsasCfaUfuCfaAfaAfaCfcAfaCfuGfsc | 382 | AGACAUUCAAAAACCAACUGC | 674 |
| AM12416-AS | asAfsgsAfcAfuUfcAfaAfaAfcCfaAfcUfsg | 383 | AAGACAUUCAAAAACCAACUG | 675 |
| AM12418-AS | asGfsusUfuAfuCfcUfuAfaAfaGfgAfgUfsg | 384 | AGUUUAUCCUUAAAAGGAGUG | 676 |
| AM12875-AS | cPrpusAfsasCfaUfcUfgGfcAfcUfcCfaCfaUfsc | 385 | UAACAUCUGGCACUCCACAUC | 655 |
| AM12877-AS | cPrpuAfacaucuggcAfcUfcCfacausc | 386 | UAACAUCUGGCACUCCACAUC | 655 |
| AM13076-AS | usCfsasAfuUfcUfgAfuUfgUfgCfaAfcAfsg | 387 | UCAAUUCUGAUUGUGCAACAG | 677 |
| AM13077-AS | cPrpusCfsasAfuUfcUfgAfuUfgUfgCfaAfcAfsc | 388 | UCAAUUCUGAUUGUGCAACAC | 668 |
| AM13079-AS | usCfsasauucugauUfgUfgCfaacasc | 389 | UCAAUUCUGAUUGUGCAACAC | 668 |
| AM13081-AS | usCfsasAfuucugauUfgUfgCfaacasc | 390 | UCAAUUCUGAUUGUGCAACAC | 668 |
| AM13082-AS | usCfsasAfuUfcugauUfgUfgCfaacasc | 391 | UCAAUUCUGAUUGUGCAACAC | 668 |
| AM13083-AS | usCfsasAfuUfcugauUfgUfgCfaAfcasc | 392 | UCAAUUCUGAUUGUGCAACAC | 668 |
| AM13212-AS | usUfsgsacacUfaAfuCfgAfuCfcacusg | 393 | UUGACACUAAUCGAUCCACUG | 661 |
| AM13215-AS | usCfscsuuuaAfuAfuCfaUfcCfugggsa | 394 | UCCUUUAAUAUCAUCCUGGGA | 666 |
| AM13241-AS | asGfsascauucaaaAfaCfcAfacugsc | 395 | AGACAUUCAAAAACCAACUGC | 674 |
| AM13244-AS | asGfsascauucAfaaAfaCfcAfacugsc | 396 | AGACAUUCAAAAACCAACUGC | 674 |
| AM13245-AS | asGfsascauuCfAfaaAfaCfcAfacugsc | 397 | AGACAUUCAAAAACCAACUGC | 674 |
| AM13246-AS | asUfsasgguuggauAfcAfuCfacugsc | 398 | AUAGGUUGGAUACAUCACUGC | 664 |
| AM13247-AS | asUfsasgguUUNAggauAfcAfuCfacugsc | 399 | AUAGGUUGGAUACAUCACUGC | 664 |
| AM13400-AS | usAfsgsuauucugcAfaCfaUfcuggsc | 400 | UAGUAUUCUGCAACAUCUGGC | 656 |
| AM13402-AS | usAfsgsuauUUNAcugcAfaCfaUfcuggsc | 401 | UAGUAUUCUGCAACAUCUGGO | 656 |
| AM13403-AS | usAfsgsuaUUNAUfcugcAfaCfaUfcuggsc | 402 | UAGUAUUCUGCAACAUCUGGC | 656 |
| AM13405-AS | asGfsusuuauccuuAfaAfaGfgagusg | 403 | AGUUUAUCCUUAAAAGGAGUG | 676 |
| AM13407-AS | asGfsusUfuauccuuAfaAfaGfgagusg | 404 | AGUUUAUCCUUAAAAGGAGUG | 676 |
| AM13409-AS | asGfsusUfuauccuuAfaAfaGfgagusc | 405 | AGUUUAUCCUUAAAAGGAGUC | 678 |
| AM14108-AS | cPrpuGfacauucAfaaAfaCfcAfacugsc | 406 | UGACAUUCAAAAACCAACUGC | 679 |
| AM14109-AS | cPrpuUfgacacUfaAfuCfgAfuCfcacusg | 407 | UUGACACUAAUCGAUCCACUG | 661 |
| AM14110-AS | cPrpasGfsasCfaUfuCfaAfaAfaCfcAfaCfuGfsc | 408 | AGACAUUCAAAAACCAACUGC | 674 |
| AM14112-AS | cPrpusGfsasCfaUfuCfaAfaAfaCfcAfaCfuGfsc | 409 | UGACAUUCAAAAACCAACUGC | 679 |
| AM14113-AS | cPrpuGfaCfaUfuCfaAfaAfaCfcAfaCfuGfsc | 410 | UGACAUUCAAAAACCAACUGC | 679 |
| AM14117-AS | cPrpusUfsgsAfcAfcUfaAfuCfgAfuCfcAfcUfsg | 411 | UUGACACUAAUCGAUCCACUG | 661 |
| AM14118-AS | cPrpuUfgAfcAfcUfaAfuCfgAfuCfcAfcUfsg | 412 | UUGACACUAAUCGAUCCACUG | 661 |
| AM14119-AS | cPrpusUfsgsacacUfaAfuCfgAfuCfcacusg | 413 | UUGACACUAAUCGAUCCACUG | 661 |
| AM14121-AS | usAfsascaucuggcAfcUfcCfacausc | 414 | UAACAUCUGGCACUCCACAUC | 655 |
| AM14122-AS | cPrpusAfsascaucuggcAfcUfcCfacausc | 415 | UAACAUCUGGCACUCCACAUC | 655 |
| AM14124-AS | cPrpusUfsasGfgUfuGfgAfuAfcAfuCfaCfuGfsc | 416 | UUAGGUUGGAUACAUCACUGC | 680 |
| AM14125-AS | usUfsasGfgUfuggauAfcAfuCfaCfugsc | 417 | UUAGGUUGGAUACAUCACUGC | 680 |
| AM14126-AS | cPrpusUfsasGfgUfuggauAfcAfuCfaCfugsc | 418 | UUAGGUUGGAUACAUCACUGC | 680 |
| AM14127-AS | cPrpuUfaGfgUfuggauAfcAfuCfaCfugsc | 419 | UUAGGUUGGAUACAUCACUGC | 680 |
| AM14129-AS | cPrpusGfsusUfuauccuuAfaAfaGfgagusg | 420 | UGUUUAUCCUUAAAAGGAGUG | 681 |
| AM14130-AS | cPrpuGfuUfuauccuuAfaAfaGfgagusg | 421 | UGUUUAUCCUUAAAAGGAGUG | 681 |
| AM14131-AS | cPrpusGfsusUfuAfuCfcUfuAfaAfaGfgAfgUfsg | 422 | UGUUUAUCCUUAAAAGGAGUG | 681 |
| AM14114-AS | cPrpasGfsascauucAfaaAfaCfcAfacugsc | 423 | AGACAUUCAAAAACCAACUGC | 674 |
| AM14116-AS | cPrpusGfsascauucAfaaAfaCfcAfacugsc | 424 | UGACAUUCAAAAACCAACUGC | 679 |
| AM14651-AS | usUfsasGfgUfuGfgAfuAfcAfuCfaCfuGfsc | 425 | UUAGGUUGGAUACAUCACUGC | 680 |
| AM14652-AS | cPrpasUfsasGfgUfuGfgAfuAfcAfuCfaCfuGfsc | 426 | AUAGGUUGGAUACAUCACUGC | 664 |
| AM14653-AS | asUfsagguuggauAfcAfuCfacusgsc | 427 | AUAGGUUGGAUACAUCACUGC | 664 |
| AM14654-AS | cPrpasUfsagguuggauAfcAfuCfacusgsc | 428 | AUAGGUUGGAUACAUCACUGC | 664 |
| AM14655-AS | cPrpasUfsaGfguuggauAfcAfuCfacusgsc | 429 | AUAGGUUGGAUACAUCACUGC | 664 |
| AM14656-AS | cPrpaUfaGfguuggauAfcAfuCfacusgsc | 430 | AUAGGUUGGAUACAUCACUGC | 664 |
| AM14657-AS | cPrpasUfsagGfuuggauAfcAfuCfacusgsc | 431 | AUAGGUUGGAUACAUCACUGC | 664 |
| AM14658-AS | cPrpasUfsagguUfggauAfcAfuCfacusgsc | 432 | AUAGGUUGGAUACAUCACUGC | 664 |
| AM14659-AS | cPrpasUfsagguugGfauAfcAfuCfacusgsc | 433 | AUAGGUUGGAUACAUCACUGC | 664 |
| AM14888-AS | cPrpasUfsasgguuggauAfcAfuCfacugsc | 434 | AUAGGUUGGAUACAUCACUGC | 664 |
| AM14889-AS | cPrpaUfagguuggauAfcAfuCfacugsc | 435 | AUAGGUUGGAUACAUCACUGC | 664 |
| AM15155-AS | cPrpaGfacauucAfaaAfaCfcAfacugsc | 436 | AGACAUUCAAAAACCAACUGC | 674 |

TABLE 4
MMP7 Agent Sense Strand Sequences
(Shown Without Linkers, Conjugates, or Capping Moieties)

| | | | Underlying Base | |
|---|---|---|---|---|
| | | | Sequence (5′ → 3′) | |
| | Modified Sense | SEQ ID | (Shown as an Unmodified | SEQ ID |
| Strand ID | Strand (5′ → 3′) | NO. | Nucleotide Sequence) | NO. |
| AM08522-SS-NL | asgauguggAfGfUfgccagauguu | 458 | AGAUGUGGAGUGCCAGAUGUU | 682 |
| AM08524-SS-NL | csgauguggAfGfUfgccagauguu | 459 | CGAUGUGGAGUGCCAGAUGUU | 683 |
| AM08526-SS-NL | asuguggagUfGfCfcagauguuga | 460 | AUGUGGAGUGCCAGAUGUUGA | 684 |
| AM08528-SS-NL | csuguggagUfGfCfcagauguuga | 461 | CUGUGGAGUGCCAGAUGUUGA | 685 |
| AM08530-SS-NL | usguggaguGfCfCfagauguugca | 462 | UGUGGAGUGCCAGAUGUUGCA | 686 |
| AM08532-SS-NL | csguggaguGfCfCfagauguugca | 463 | CGUGGAGUGCCAGAUGUUGCA | 687 |
| AM08534-SS-NL | usggagugcCfAfGfauguugcaga | 464 | UGGAGUGCCAGAUGUUGCAGA | 688 |
| AM08536-SS-NL | csggagugcCfAfGfauguugcaga | 465 | CGGAGUGCCAGAUGUUGCAGA | 689 |
| AM08538-SS-NL | gsgagugccAfGfAfuguugcagaa | 466 | GGAGUGCCAGAUGUUGCAGAA | 690 |
| AM08540-SS-NL | gsagugccaGfAfUfguugcagaau | 467 | GAGUGCCAGAUGUUGCAGAAU | 691 |
| AM08542-SS-NL | asgugccagAfUfGfuugcagaaua | 468 | AGUGCCAGAUGUUGCAGAAUA | 692 |
| AM08544-SS-NL | csgugccagAfUfGfuugcagaaua | 469 | CGUGCCAGAUGUUGCAGAAUA | 693 |
| AM08546-SS-NL | csccauuugAfUfGfggccaggaaa | 470 | CCCAUUUGAUGGGCCAGGAAA | 694 |
| AM08548-SS-NL | csuugauggGfCfCfaggaaacaca | 471 | CUUGAUGGGCCAGGAAACACA | 695 |
| AM12366-SS-NL | caggcucaGfGfAfcuaucucaaa | 472 | CAGGCUCAGGACUAUCUCAAA | 696 |
| AM12368-SS-NL | gucucaagAfGfAfuuuuaucucu | 473 | GUCUCAAGAGAUUUUAUCUCU | 697 |
| AM12370-SS-NL | ca_2NagagauUfUfUfaucucuauga | 474 | CAAGAGAUUUUAUCUCUAUGA | 698 |
| AM12372-SS-NL | gagauuuuAfUfCfucuaugacua | 475 | GAGAUUUUAUCUCUAUGACUA | 699 |
| AM12374-SS-NL | gauguggaGfUfGfccagauguua | 476 | GAUGUGGAGUGCCAGAUGUUA | 700 |
| AM12376-SS-NL | ggagugccAfGfAfuguuicagaa | 477 | GGAGUGCCAGAUGUUICAGAA | 701 |
| AM12377-SS-NL | gccagaugUfUfGfcagaauacua | 478 | GCCAGAUGUUGCAGAAUACUA | 702 |
| AM12379-SS-NL | gguugcagAfAfUfacucacuauu | 479 | GGUUGCAGAAUACUCACUAUU | 703 |
| AM12381-SS-NL | sguugcagaAfUfAfcucacuauuu | 480 | GUUGCAGAAUACUCACUAUUU | 704 |
| AM12383-SS-NL | guuacaguGfGfAfucgauuagua | 481 | GUUACAGUGGAUCGAUUAGUA | 705 |
| AM12385-SS-NL | guacagugGfAfUfcgauuaiugu | 482 | GUACAGUGGAUCGAUUAIUGU | 706 |
| AM12387-SS-NL | caguggauCfGfAfuuaguiucaa | 483 | CAGUGGAUCGAUUAGUIUCAA | 707 |
| AM12389-SS-NL | aggagaugCfUfCfacuuciauga | 484 | AGGAGAUGCUCACUUCIAUGA | 708 |
| AM12391-SS-NL | ggauuaacUfUfCfcuguaugcua | 485 | GGAUUAACUUCCUGUAUGCUA | 709 |
| AM12393-SS-NL | gcagugauGfUfAfuccaaccuau | 486 | GCAGUGAUGUAUCCAACCUAU | 710 |
| AM12395-SS-NL | guguauccAfAfCfcuauggaaau | 487 | GUGUAUCCAACCUAUGGAAAU | 711 |
| AM12397-SS-NL | ucccaggaUfGfAfuauuaaagga | 488 | UCCCAGGAUGAUAUUAAAGGA | 712 |
| AM12399-SS-NL | gaaaggcaUfUfCfagaaacuaua | 489 | GAAAGGCAUUCAGAAACUAUA | 713 |
| AM12401-SS-NL | guguugcaCfAfAfucagaauuga | 490 | GUGUUGCACAAUCAGAAUUGA | 714 |
| AM12403-SS-NL | gguugcacAfAfUfcagaauugau | 491 | GGUUGCACAAUCAGAAUUGAU | 715 |
| AM12405-SS-NL | cacaaucaGfAfAfuugauaagca | 492 | CACAAUCAGAAUUGAUAAGCA | 716 |
| AM12407-SS-NL | gcaaucagAfAfUfugauaagcaa | 493 | GCAAUCAGAAUUGAUAAGCAA | 717 |
| AM12409-SS-NL | gugucaccCfUfUfuuuuauugca | 494 | GUGUCACCCUUUUUUAUUGCA | 718 |
| AM12411-SS-NL | gugcaguuGfGfUfuuuugaaugu | 495 | GUGCAGUUGGUUUUUGAAUGU | 719 |
| AM12413-SS-NL | gcaguuggUfUfUfuugaaugucu | 496 | GCAGUUGGUUUUUGAAUGUCU | 720 |
| AM12415-SS-NL | caguugguUfUfUfugaaugucuu | 497 | CAGUUGGUUUUUGAAUGUCUU | 721 |
| AM12417-SS-NL | cacuccuuUfUfAfaggauaaacu | 498 | CACUCCUUUUAAGGAUAAACU | 722 |
| AM12874-SS-NL | gsauguggaGfUfGfccagauguua | 499 | GAUGUGGAGUGCCAGAUGUUA | 700 |
| AM12876-SS-NL | gsauguggaGfuGfcCfagauguua | 500 | GAUGUGGAGUGCCAGAUGUUA | 700 |
| AM13075-SS-NL | cuguugcaCfAfAfucagaauuga | 501 | CUGUUGCACAAUCAGAAUUGA | 723 |
| AM13078-SS-NL | guguugCfaCfaAfucagaauuga | 502 | GUGUUGCACAAUCAGAAUUGA | 714 |
| AM13080-SS-NL | guguugcaCfaAfuCfagaauuga | 503 | GUGUUGCACAAUCAGAAUUGA | 714 |
| AM13084-SS-NL | guguugcaCfaAfucagaauuga | 504 | GUGUUGCACAAUCAGAAUUGA | 714 |
| AM13210-SS-NL | caguggauCfGfAfuuagugucaa | 505 | CAGUGGAUCGAUUAGUGUCAA | 724 |
| AM13211-SS-NL | caguggAfuCfgAfuuagugucaa | 506 | CAGUGGAUCGAUUAGUGUCAA | 724 |
| AM13213-SS-NL | caguggauCfgAfuUfagugucaa | 507 | CAGUGGAUCGAUUAGUGUCAA | 724 |
| AM13214-SS-NL | caguggauCfgAfuUfaguiucaa | 508 | CAGUGGAUCGAUUAGUIUCAA | 707 |
| AM13216-SS-NL | ucccaggaUfGfAfuAfuuaaagga | 509 | UCCCAGGAUGAUAUUAAAGGA | 712 |
| AM13217-SS-NL | ucccaggaUfgAfuAfuuaaagga | 510 | UCCCAGGAUGAUAUUAAAGGA | 712 |
| AM13218-SS-NL | ucccaggaUfGfAfua_2Nuuaaagga | 511 | UCCCAGGAUGAUAUUAAAGGA | 712 |
| AM13242-SS-NL | gcaguuggUfuUfuUfgaaugucu | 512 | GCAGUUGGUUUUUGAAUGUCU | 720 |
| AM13243-SS-NL | gcaguuggUfUfUfuUfgaaugucu | 513 | GCAGUUGGUUUUUGAAUGUCU | 720 |
| AM13248-SS-NL | gcagugauGfuAfUfccaaccuau | 514 | GCAGUGAUGUAUCCAACCUAU | 710 |
| AM13249-SS-NL | gcagugAfuGfuAfuccaaccuau | 515 | GCAGUGAUGUAUCCAACCUAU | 710 |
| AM13250-SS-NL | gcagugauGfuAfuCfcaaccuau | 516 | GCAGUGAUGUAUCCAACCUAU | 710 |
| AM13399-SS-NL | gccagaugUfuGfcAfgaauacua | 517 | GCCAGAUGUUGCAGAAUACUA | 702 |
| AM13401-SS-NL | gccagaUfgUfuGfcagaauacua | 518 | GCCAGAUGUUGCAGAAUACUA | 702 |
| AM13404-SS-NL | cacuccUfuUfuAfaggauaaacu | 519 | CACUCCUUUUAAGGAUAAACU | 722 |
| AM13406-SS-NL | cacuccuuUfuAfAfggauaaacu | 520 | CACUCCUUUUAAGGAUAAACU | 722 |
| AM13408-SS-NL | gacuccuuUfUfAfaggauaaacu | 521 | GACUCCUUUUAAGGAUAAACU | 725 |
| AM13762-SS-NL | gscaguuggUfuUfuUfgaaugucu | 522 | GCAGUUGGUUUUUGAAUGUCU | 720 |
| AM13763-SS-NL | gscaguuggUfUfUfuugaaugucu | 523 | GCAGUUGGUUUUUGAAUGUCU | 720 |
| AM13764-SS-NL | csaguggauCfgAfuUfagugucaa | 524 | CAGUGGAUCGAUUAGUGUCAA | 724 |
| AM13765-SS-NL | csaguggauCfgAfuUfaguiucaa | 525 | CAGUGGAUCGAUUAGUIUCAA | 707 |
| AM14107-SS-NL | gscaguuggUfuUfuUfgaauguca | 526 | GCAGUUGGUUUUUGAAUGUCA | 726 |
| AM14111-SS-NL | gcaguuggUfUfUfuugaauguca | 527 | GCAGUUGGUUUUUGAAUGUCA | 726 |
| AM14120-SS-NL | gauguggaGfuGfcCfagauguua | 528 | GAUGUGGAGUGCCAGAUGUUA | 700 |
| AM14123-SS-NL | gcagugauGfUfAfuccaaccuaa | 529 | GCAGUGAUGUAUCCAACCUAA | 727 |
| AM14128-SS-NL | cacuccuuUfUfAfaggauaaaca | 530 | CACUCCUUUUAAGGAUAAACA | 728 |
| AM14115-SS-NL | gcaguuggUfuUfuUfgaauguca | 531 | GCAGUUGGUUUUUGAAUGUCA | 726 |
| AM14553-SS-NL | gscagugauGfuAfuCfcaaccuau | 532 | GCAGUGAUGUAUCCAACCUAU | 710 |
| AM14890-SS-NL | gscsaguuggUfuUfuUfgaaugucsu | 533 | GCAGUUGGUUUUUGAAUGUCU | 720 |
| AM14892-SS-NL | gsCfsasguuggUfuuUfuGfaAfugucsu | 534 | GCAGUUGGUUUUUGAAUGUCU | 720 |
| AM15418-SS-NL | gscguuggUfuUfuUfgaauguca | 535 | GCGUUGGUUUUUGAAUGUCA | 729 |
| AM15419-SS-NL | gscaguugggUfuUfuUfgaauguca | 536 | GCAGUUGGGUUUUUGAAUGUCA | 730 |
| AM15420-SS-NL | gscaguuggUfuUfuUfgaauguca | 526 | GCAGUUGGUUUUUGAAUGUCA | 726 |
| AM16013-SS-NL | gscaguuggUfuUfuUfgaauguca | 526 | GCAGUUGGUUUUUGAAUGUCA | 726 |

a_2N = 2-aminoadenosine nucleotide;
I = hypoxanthine (inosine) nucleotide

TABLE 5
MMP7 Agent Sense Strand Sequences (Shown With Linkers and
and Capping Groups (see Table 11 for structure information.))

| | | | Underlying Base | |
|---|---|---|---|---|
| | | | Sequence (5′ → 3′) | |
| | | SEQ | (Shown as an Unmodified | SEQ |
| Strand ID | Modified Sense Strand (5′ → 3′) | ID NO. | Nucleotide Sequence) | ID NO. |
| AM08522-SS | (NH2-C6)asgauguggAfGfUfgccagauguus(invAb) | 539 | AGAUGUGGAGUGCCAGAUGUU | 682 |
| AM08524-SS | (NH2-C6)csgauguggAfGfUfgccagauguus(invAb) | 540 | CGAUGUGGAGUGCCAGAUGUU | 683 |
| AM08526-SS | (NH2-C6)asuguggagUfGfCfcagauguugas(invAb) | 541 | AUGUGGAGUGCCAGAUGUUGA | 684 |
| AM08528-SS | (NH2-C6)csuguggagUfGfCfcagauguugas(invAb) | 542 | CUGUGGAGUGCCAGAUGUUGA | 685 |
| AM08530-SS | (NH2-C6)usguggaguGfCfCfagauguugcas(invAb) | 543 | UGUGGAGUGCCAGAUGUUGCA | 686 |
| AM08532-SS | (NH2-C6)csguggaguGfCfCfagauguugcas(invAb) | 544 | CGUGGAGUGCCAGAUGUUGCA | 687 |
| AM08534-SS | (NH2-C6)usggagugcCfAfGfauguugcagas(invAb) | 545 | UGGAGUGCCAGAUGUUGCAGA | 688 |
| AM08536-SS | (NH2-C6)csggagugcCfAfGfauguugcagas(invAb) | 546 | CGGAGUGCCAGAUGUUGCAGA | 689 |
| AM08538-SS | (NH2-C6)gsgagugccAfGfAfuguugcagaas(invAb) | 547 | GGAGUGCCAGAUGUUGCAGAA | 690 |
| AM08540-SS | (NH2-C6)gsagugccaGfAfUfguugcagaaus(invAb) | 548 | GAGUGCCAGAUGUUGCAGAAU | 691 |
| AM08542-SS | (NH2-C6)asgugccagAfUfGfuugcagaauas(invAb) | 549 | AGUGCCAGAUGUUGCAGAAUA | 692 |
| AM08544-SS | (NH2-C6)csgugccagAfUfGfuugcagaauas(invAb) | 550 | CGUGCCAGAUGUUGCAGAAUA | 693 |
| AM08546-SS | (NH2-C6)csccauuugAfUfGfggccaggaaas(invAb) | 551 | CCCAUUUGAUGGGCCAGGAAA | 694 |
| AM08548-SS | (NH2-C6)csuugauggGfCfCfaggaaacacas(invAb) | 552 | CUUGAUGGGCCAGGAAACACA | 695 |
| AM12366-SS | (NAG37)s(invAb)scaggcucaGfGfAfcuaucucaaas(invAb) | 553 | CAGGCUCAGGACUAUCUCAAA | 696 |
| AM12368-SS | (NAG37)s(invAb)sgucucaagAfGfAfuuuuaucucus(invAb) | 554 | GUCUCAAGAGAUUUUAUCUCU | 697 |
| AM12370-SS | (NAG37)s(invAb)sca_2NagagauUfUfUfaucucuaugas(invAb) | 555 | CAAGAGAUUUUAUCUCUAUGA | 698 |
| AM12372-SS | (NAG37)s(invAb)sgagauuuuAfUfCfucuaugacuas(invAb) | 556 | GAGAUUUUAUCUCUAUGACUA | 699 |
| AM12374-SS | (NAG37)s(invAb)sgauguggaGfUfGfccagauguuas(invAb) | 557 | GAUGUGGAGUGCCAGAUGUUA | 700 |
| AM12376-SS | (NAG37)s(invAb)sggagugccAfGfAfuguuicagaas(invAb) | 558 | GGAGUGCCAGAUGUUICAGAA | 701 |
| AM12377-SS | (NAG37)s(invAb)sgccagaugUfUfGfcagaauacuas(invAb) | 559 | GCCAGAUGUUGCAGAAUACUA | 702 |
| AM12379-SS | (NAG37)s(invAb)sgguugcagAfAfUfacucacuauus(invAb) | 560 | GGUUGCAGAAUACUCACUAUU | 703 |
| AM12381-SS | (NAG37)s(invAb)sguugcagaAfUfAfcucacuauuus(invAb) | 561 | GUUGCAGAAUACUCACUAUUU | 704 |
| AM12383-SS | (NAG37)s(invAb)sguuacaguGfGfAfucgauuaguas(invAb) | 562 | GUUACAGUGGAUCGAUUAGUA | 705 |
| AM12385-SS | (NAG37)s(invAb)sguacagugGfAfUfcgauuaiugus(invAb) | 563 | GUACAGUGGAUCGAUUAIUGU | 706 |
| AM12387-SS | (NAG37)s(invAb)scaguggauCfGfAfuuaguiucaas(invAb) | 564 | CAGUGGAUCGAUUAGUIUCAA | 707 |
| AM12389-SS | (NAG37)s(invAb)saggagaugCfUfCfacuuciaugas(invAb) | 565 | AGGAGAUGCUCACUUCIAUGA | 708 |
| AM12391-SS | (NAG37)s(invAb)sggauuaacUfUfCfcuguaugcuas(invAb) | 566 | GGAUUAACUUCCUGUAUGCUA | 709 |
| AM12393-SS | (NAG37)s(invAb)sgcagugauGfUfAfuccaaccuaus(invAb) | 567 | GCAGUGAUGUAUCCAACCUAU | 710 |
| AM12395-SS | (NAG37)s(invAb)sguguauccAfAfCfcuauggaaaus(invAb) | 568 | GUGUAUCCAACCUAUGGAAAU | 711 |
| AM12397-SS | (NAG37)s(invAb)succcaggaUfGfAfuauuaaaggas(invAb) | 569 | UCCCAGGAUGAUAUUAAAGGA | 712 |
| AM12399-SS | (NAG37)s(invAb)sgaaaggcaUfUfCfagaaacuauas(invAb) | 570 | GAAAGGCAUUCAGAAACUAUA | 713 |
| AM12401-SS | (NAG37)s(invAb)sguguugcaCfAfAfucagaauugas(invAb) | 571 | GUGUUGCACAAUCAGAAUUGA | 714 |
| AM12403-SS | (NAG37)s(invAb)sgguugcacAfAfUfcagaauugaus(invAb) | 572 | GGUUGCACAAUCAGAAUUGAU | 715 |
| AM12405-SS | (NAG37)s(invAb)scacaaucaGfAfAfuugauaagcas(invAb) | 573 | CACAAUCAGAAUUGAUAAGCA | 716 |
| AM12407-SS | (NAG37)s(invAb)sgcaaucagAfAfUfugauaagcaas(invAb) | 574 | GCAAUCAGAAUUGAUAAGCAA | 717 |
| AM12409-SS | (NAG37)s(invAb)sgugucaccCfUfUfuuuuauugcas(invAb) | 575 | GUGUCACCCUUUUUUAUUGCA | 718 |
| AM12411-SS | (NAG37)s(invAb)sgugcaguuGfGfUfuuuugaaugus(invAb) | 576 | GUGCAGUUGGUUUUUGAAUGU | 719 |
| AM12413-SS | (NAG37)s(invAb)sgcaguuggUfUfUfuugaaugucus(invAb) | 577 | GCAGUUGGUUUUUGAAUGUCU | 720 |
| AM12415-SS | (NAG37)s(invAb)scaguugguUfUfUfugaaugucuus(invAb) | 578 | CAGUUGGUUUUUGAAUGUCUU | 721 |
| AM12417-SS | (NAG37)s(invAb)scacuccuuUfUfAfaggauaaacus(invAb) | 579 | CACUCCUUUUAAGGAUAAACU | 722 |
| AM12874-SS | (TriAlk14)gsauguggaGfUfGfccagauguuas(invAb) | 580 | GAUGUGGAGUGCCAGAUGUUA | 700 |
| AM12876-SS | (TriAlk14)gsauguggaGfuGfcCfagauguuas(invAb) | 581 | GAUGUGGAGUGCCAGAUGUUA | 700 |
| AM13075-SS | (NAG37)s(invAb)scuguugcaCfAfAfucagaauugas(invAb) | 582 | CUGUUGCACAAUCAGAAUUGA | 723 |
| AM13078-SS | (NAG37)s(invAb)sguguugCfaCfaAfucagaauugas(invAb) | 583 | GUGUUGCACAAUCAGAAUUGA | 714 |
| AM13080-SS | (NAG37)s(invAb)sguguugcaCfaAfuCfagaauugas(invAb) | 584 | GUGUUGCACAAUCAGAAUUGA | 714 |
| AM13084-SS | (NAG37)s(invAb)sguguugcaCfaAfucagaauugas(invAb) | 585 | GUGUUGCACAAUCAGAAUUGA | 714 |
| AM13210-SS | (NAG37)s(invAb)scaguggauCfGfAfuuagugucaas(invAb) | 586 | CAGUGGAUCGAUUAGUGUCAA | 724 |
| AM13211-SS | (NAG37)s(invAb)scaguggAfuCfgAfuuagugucaas(invAb) | 587 | CAGUGGAUCGAUUAGUGUCAA | 724 |
| AM13213-SS | (NAG37)s(invAb)scaguggauCfgAfuUfagugucaas(invAb) | 588 | CAGUGGAUCGAUUAGUGUCAA | 724 |
| AM13214-SS | (NAG37)s(invAb)scaguggauCfgAfuUfaguiucaas(invAb) | 589 | CAGUGGAUCGAUUAGUIUCAA | 707 |
| AM13216-SS | (NAG37)s(invAb)succcaggaUfGfAfuAfuuaaaggas(invAb) | 590 | UCCCAGGAUGAUAUUAAAGGA | 712 |
| AM13217-SS | (NAG37)s(invAb)succcaggaUfgAfuAfuuaaaggas(invAb) | 591 | UCCCAGGAUGAUAUUAAAGGA | 712 |
| AM13218-SS | (NAG37)s(invAb)succcaggaUfGfAfua_2Nuuaaaggas(invAb) | 592 | UCCCAGGAUGAUAUUAAAGGA | 712 |
| AM13242-SS | (NAG37)s(invAb)sgcaguuggUfuUfuUfgaaugucus(invAb) | 593 | GCAGUUGGUUUUUGAAUGUCU | 720 |
| AM13243-SS | (NAG37)s(invAb)sgcaguuggUfUfUfuUfgaaugucus(invAb) | 594 | GCAGUUGGUUUUUGAAUGUCU | 720 |
| AM13248-SS | (NAG37)s(invAb)sgcagugauGfuAfUfccaaccuaus(invAb) | 595 | GCAGUGAUGUAUCCAACCUAU | 710 |
| AM13249-SS | (NAG37)s(invAb)sgcagugAfuGfuAfuccaaccuaus(invAb) | 596 | GCAGUGAUGUAUCCAACCUAU | 710 |
| AM13250-SS | (NAG37)s(invAb)sgcagugauGfuAfuCfcaaccuaus(invAb) | 597 | GCAGUGAUGUAUCCAACCUAU | 710 |
| AM13399-SS | (NAG37)s(invAb)sgccagaugUfuGfcAfgaauacuas(invAb) | 598 | GCCAGAUGUUGCAGAAUACUA | 702 |
| AM13401-SS | (NAG37)s(invAb)sgccagaUfgUfuGfcagaauacuas(invAb) | 599 | GCCAGAUGUUGCAGAAUACUA | 702 |
| AM13404-SS | (NAG37)s(invAb)scacuccUfuUfuAfaggauaaacus(invAb) | 600 | CACUCCUUUUAAGGAUAAACU | 722 |
| AM13406-SS | (NAG37)s(invAb)scacuccuuUfuAfAfggauaaacus(invAb) | 601 | CACUCCUUUUAAGGAUAAACU | 722 |
| AM13408-SS | (NAG37)s(invAb)sgacuccuuUfUfAfaggauaaacus(invAb) | 602 | GACUCCUUUUAAGGAUAAACU | 725 |
| AM13762-SS | (TriAlk14)gscaguuggUfuUfuUfgaaugucus(invAb) | 603 | GCAGUUGGUUUUUGAAUGUCU | 720 |
| AM13763-SS | (TriAlk14)gscaguuggUfUfUfuugaaugucus(invAb) | 604 | GCAGUUGGUUUUUGAAUGUCU | 720 |
| AM13764-SS | (TriAlk14)csaguggauCfgAfuUfagugucaas(invAb) | 605 | CAGUGGAUCGAUUAGUGUCAA | 724 |
| AM13765-SS | (TriAlk14)csaguggauCfgAfuUfaguiucaas(invAb) | 606 | CAGUGGAUCGAUUAGUIUCAA | 707 |
| AM14107-SS | (TriAlk14)gscaguuggUfuUfuUfgaaugucas(invAb) | 607 | GCAGUUGGUUUUUGAAUGUCA | 726 |
| AM14111-SS | (NAG37)s(invAb)sgcaguuggUfUfUfuugaaugucas(invAb) | 608 | GCAGUUGGUUUUUGAAUGUCA | 726 |
| AM14120-SS | (NAG37)s(invAb)sgauguggaGfuGfcCfagauguuas(invAb) | 609 | GAUGUGGAGUGCCAGAUGUUA | 700 |
| AM14123-SS | (NAG37)s(invAb)sgcagugauGfUfAfuccaaccuaas(invAb) | 610 | GCAGUGAUGUAUCCAACCUAA | 727 |
| AM14128-SS | (NAG37)s(invAb)scacuccuuUfUfAfaggauaaacas(invAb) | 611 | CACUCCUUUUAAGGAUAAACA | 728 |
| AM14115-SS | (NAG37)s(invAb)sgcaguuggUfuUfuUfgaaugucas(invAb) | 612 | GCAGUUGGUUUUUGAAUGUCA | 726 |
| AM14553-SS | (TriAlk14)gscagugauGfuAfuCfcaaccuaus(invAb) | 613 | GCAGUGAUGUAUCCAACCUAU | 710 |
| AM14890-SS | (invAb)sgscsaguuggUfuUfuUfgaaugucsu | 614 | GCAGUUGGUUUUUGAAUGUCU | 720 |
| AM15418-SS | (TriAlk14)gscguuggUfuUfuUfgaaugucas(invAb) | 615 | GCGUUGGUUUUUGAAUGUCA | 729 |
| AM15419-SS | (TriAlk14)gscaguugggUfuUfuUfgaaugucas(invAb) | 616 | GCAGUUGGGUUUUUGAAUGUCA | 730 |
| AM15420-SS | (TriAlk14)gscaguuggUfuUfuUfgaauguca(invAb) | 617 | GCAGUUGGUUUUUGAAUGUCA | 726 |

a_2N = 2-aminoadenosine nucleotide;
I = hypoxanthine (inosine) nucleotide

TABLE 6
MMP7 Agent Sense Strand Sequences (Shown with Targeting Ligand Conjugate.
The structure of αvβ6-SM6.1 is shown in Table 11,
and the structure of Tri-SM6.1-αvβ6-(TA14) is shown in FIG. 1.)

| | | | Corresponding |
|---|---|---|---|
| | | | Sense Strand |
| | | | AM Number |
| | | | Without Linker |
| Strand | | SEQ | or Conjugate |
| ID | Modified Sense Strand (5′ → 3′) | ID NO. | (See Table 4) |
| CS001585 | Tri-SM6.1-αvβ6-(TA14)-gsauguggaGfUfGfccagauguuas(invAb) | 618 | AM12874-SS |
| CS001588 | Tri-SM6.1-αvβ6-(TA14)-gsauguggaGfuGfcCfagauguuas(invAb) | 619 | AM12876-SS |
| CS001941 | Tri-SM6.1-αvβ6-(TA14)-gscaguuggUfuUfuUfgaaugucus(invAb) | 620 | AM13762-SS |
| CS001944 | Tri-SM6.1-αvβ6-(TA14)-gscaguuggUfUfUfuugaaugucus(invAb) | 621 | AM13763-SS |
| CS001945 | Tri-SM6.1-αvβ6-(TA14)-csaguggauCfgAfuUfagugucaas(invAb) | 622 | AM13764-SS |
| CS001947 | Tri-SM6.1-αvβ6-(TA14)-csaguggauCfgAfuUfaguiucaas(invAb) | 623 | AM13765-SS |
| CS002396 | Tri-SM6.1-αvβ6-(TA14)-gscagugauGfuAfuCfcaaccuaus(invAb) | 624 | AM14553-SS |
| CS002805 | Tri-SM6.1-αvβ6-(TA14)-gscguuggUfuUfuUfgaaugucas(invAb) | 625 | AM15418-SS |
| CS002806 | Tri-SM6.1-αvβ6-(TA14)-gscaguugggUfuUfuUfgaaugucas(invAb) | 626 | AM15419-SS |
| CS002807 | Tri-SM6.1-αvβ6-(TA14)-gscaguuggUfuUfuUfgaauguca(invAb) | 627 | AM15420-SS |
| CS002133 | Tri-SM6.1-αvβ6-(TA14)-gscaguuggUfuUfuUfgaaugucas(invAb) | 628 | AM14107-SS |

[0168] The MMP7 RNAi agents disclosed herein are formed by annealing an antisense strand with a sense strand. A sense strand containing a sequence listed in Table 2, Table 4, Table 5, or Table 6 can be hybridized to any antisense strand containing a sequence listed in Table 2 or Table 3, provided the two sequences have a region of at least 85% complementarity over a contiguous 16, 17, 18, 19, 20, or 21 nucleotide sequence.

[0169] As shown in Table 5 above, certain of the example MMP7 RNAi agent nucleotide sequences are shown to further include reactive linking groups at one or both of the 5′ terminal end and the 3′ terminal end of the sense strand. For example, many of the MMP7 RNAi agent sense strand sequences shown in Table 5 above have a (TriAlk14) linking group at the 5′ end of the nucleotide sequence. Other linking groups, such as an (NH2-C6) linking group or a (6-SS-6) or (C6-SS-C6) linking group, may be present as well or alternatively in certain embodiments. Such reactive linking groups are positioned to facilitate the linking of targeting ligands, targeting groups, and/or PK/PD modulators to the MMP7 RNAi agents disclosed herein. Linking or conjugation reactions are well known in the art and provide for formation of covalent linkages between two molecules or reactants. Suitable conjugation reactions for use in the scope of the inventions herein include, but are not limited to, amide coupling reaction, Michael addition reaction, hydrazone formation reaction, inverse-demand Diels-Alder cycloaddition reaction, oxime ligation, and Copper (I)-catalyzed or strain-promoted azide-alkyne cycloaddition reaction cycloaddition reaction.

[0170] In some embodiments, targeting ligands, such as the integrin targeting ligands shown in the examples and figures disclosed herein, can be synthesized as activated esters, such as tetrafluorophenyl (TFP) esters, which can be displaced by a reactive amino group (e.g., NH₂-C₆) to attach the targeting ligand to the MMP7 RNAi agents disclosed herein. In some embodiments, targeting ligands are synthesized as azides, which can be conjugated to a propargyl (e.g., TriAlk14) or DBCO group, for example, via Copper (I)-catalyzed or strain-promoted azide-alkyne cycloaddition reaction.

[0171] Additionally, certain of the nucleotide sequences can be synthesized with a dT nucleotide at the 3′ terminal end of the sense strand, followed by (3′→5′) a linker (e.g., C6-SS-C6). The linker can, in some embodiments, facilitate the linkage to additional components, such as, for example, a PK/PD modulator or one or more targeting ligands. As described herein, the disulfide bond of C6-SS-C6 is first reduced, removing the dT from the molecule, which can then facilitate the conjugation of the desired PK/PD modulator. The terminal dT nucleotide therefore is not a part of the fully conjugated construct.

[0172] In some embodiments, the antisense strand of a MMP7 RNAi agent disclosed herein differs by 0, 1, 2, or 3 nucleotides from any of the antisense strand sequences in Table 3 or Table 10. In some embodiments, the sense strand of a MMP7 RNAi agent disclosed herein differs by 0, 1, 2, or 3 nucleotides from any of the sense strand sequences in Table 4, Table 5, Table 6, or Table 10.

[0173] In some embodiments, a MMP7 RNAi agent antisense strand comprises a nucleotide sequence of any of the sequences in Table 2 or Table 3. In some embodiments, a MMP7 RNAi agent antisense strand comprises the sequence of nucleotides (from 5′ end→3′ end) 1-17, 2-17, 1-18, 2-18, 1-19, 2-19, 1-20, 2-20, 1-21, 2-21, 1-22, 2-22, 1-23, 2-23, 1-24, or 2-24 of any of the sequences in Table 2, Table 3, or Table 10. In certain embodiments, a MMP7 RNAi agent antisense strand comprises or consists of a modified sequence of any one of the modified sequences in Table 3 or Table 10.

[0174] In some embodiments, a MMP7 RNAi agent sense strand comprises the nucleotide sequence of any of the sequences in Table 2 or Table 4. In some embodiments, a MMP7 RNAi agent sense strand comprises the sequence of nucleotides (from 5′ end→3′ end) 1-17, 2-17, 3-17, 4-17, 1-18, 2-18, 3-18, 4-18, 1-19, 2-19, 3-19, 4-19, 1-20, 2-20, 3-20, 4-20, 1-21, 2-21, 3-21, 4-21, 1-22, 2-22, 3-22, 4-22, 1-23, 2-23, 3-23, 4-23, 1-24, 2-24, 3-24, or 4-24, of any of the sequences in Table 2, Table 4, Table 5, Table 6, or Table 10. In certain embodiments, a MMP7 RNAi agent sense strand comprises or consists of a modified sequence of any one of the modified sequences in Table 3 or Table 10.

[0175] For the RNAi agents disclosed herein, the nucleotide at position 1 of the antisense strand (from 5′ end→3′ end) can be perfectly complementary to a MMP7 gene, or can be non-complementary to a MMP7 gene. In some embodiments, the nucleotide at position 1 of the antisense strand (from 5′ end→3′ end) is a U, A, or dT (or a modified version of U, A or dT). In some embodiments, the nucleotide at position 1 of the antisense strand (from 5′ end→3′ end) forms an A:U or U:A base pair with the sense strand.

[0176] In some embodiments, a MMP7 RNAi agent antisense strand comprises the sequence of nucleotides (from 5′ end→3′ end) 2-18 or 2-19 of any of the antisense strand sequences in Table 2, Table 3, or Table 10. In some embodiments, a MMP7 RNAi sense strand comprises the sequence of nucleotides (from 5′ end→3′ end) 1-17 or 1-18 of any of the sense strand sequences in Table 2, Table 4, Table 5, Table 6, or Table 10.

[0177] In some embodiments, a MMP7 RNAi agent includes (i) an antisense strand comprising the sequence of nucleotides (from 5′ end→3′ end) 2-18 or 2-19 of any of the antisense strand sequences in Table 2, Table 3, or Table 10, and (ii) a sense strand comprising the sequence of nucleotides (from 5′ end→3′ end) 1-17 or 1-18 of any of the sense strand sequences in Table 2, Table 4, Table 5, Table 6, or Table 10.

[0178] A sense strand containing a sequence listed in Table 2 or Table 4 can be hybridized to any antisense strand containing a sequence listed in Table 2 or Table 3 provided the two sequences have a region of at least 85% complementarity over a contiguous 16, 17, 18, 19, 20, or 21 nucleotide sequence. In some embodiments, the MMP7 RNAi agent has a sense strand consisting of the modified sequence of any of the modified sequences in Table 4, Table 5, Table 6, or Table 10, and an antisense strand consisting of the modified sequence of any of the modified sequences in Table 3 or Table 10. Certain representative sequence pairings are exemplified by the Duplex ID Nos. shown in Tables 7A, 7B, 8, and 9.

[0179] In some embodiments, a MMP7 RNAi agent comprises, consists of, or consists essentially of a duplex represented by any one of the Duplex ID Nos. presented herein. In some embodiments, a MMP7 RNAi agent consists of any of the Duplex ID Nos. presented herein. In some embodiments, a MMP7 RNAi agent comprises the sense strand and antisense strand nucleotide sequences of any of the Duplex ID Nos. presented herein. In some embodiments, a MMP7 RNAi agent comprises the sense strand and antisense strand nucleotide sequences of any of the Duplex ID Nos. presented herein and a targeting group, linking group, and/or other non-nucleotide group wherein the targeting group, linking group, and/or other non-nucleotide group is covalently linked (i.e., conjugated) to the sense strand or the antisense strand. In some embodiments, a MMP7 RNAi agent includes the sense strand and antisense strand modified nucleotide sequences of any of the Duplex ID Nos. presented herein. In some embodiments, a MMP7 RNAi agent comprises the sense strand and antisense strand modified nucleotide sequences of any of the Duplex ID Nos. presented herein and a targeting group, linking group, and/or other non-nucleotide group, wherein the targeting group, linking group, and/or other non-nucleotide group is covalently linked to the sense strand or the antisense strand.

[0180] In some embodiments, a MMP7 RNAi agent comprises an antisense strand and a sense strand having the nucleotide sequences of any of the antisense strand/sense strand duplexes of Tables 2, 7A, 7B, 8, 9, or 10, and comprises a targeting group. In some embodiments, a MMP7 RNAi agent comprises an antisense strand and a sense strand having the nucleotide sequences of any of the antisense strand/sense strand duplexes of Tables 2, 7A, 7B, 8, 9, or 10, and comprises one or more αvβ6 integrin targeting ligands.

[0181] In some embodiments, a MMP7 RNAi agent comprises an antisense strand and a sense strand having the nucleotide sequences of any of the antisense strand/sense strand duplexes of Tables 2, 7A, 7B, 8, 9, or 10, and comprises a targeting group that is an integrin targeting ligand. In some embodiments, a MMP7 RNAi agent comprises an antisense strand and a sense strand having the nucleotide sequences of any of the antisense strand/sense strand duplexes of Tables 2, 7A, 7B, 8, 9, or 10, and comprises one or more αvβ6 integrin targeting ligands or clusters of αvβ6 integrin targeting ligands (e.g., a tridentate αvβ6 integrin targeting ligand).

[0182] In some embodiments, a MMP7 RNAi agent comprises an antisense strand and a sense strand having the modified nucleotide sequences of any of the antisense strand/sense strand duplexes of Tables 7A, 7B, 8, 9, and 10.

[0183] In some embodiments, a MMP7 RNAi agent comprises an antisense strand and a sense strand having the modified nucleotide sequences of any of the antisense strand/sense strand duplexes of Tables 7A, 7B, 8, 9, and 10, and comprises an integrin targeting ligand.

[0184] In some embodiments, a MMP7 RNAi agent comprises, consists of, or consists essentially of any of the duplexes of Tables 7A, 7B, 8, 9, and 10.

TABLE 7A
MMP7 RNAi Agent Duplexes with Corresponding Sense and Antisense
Strand ID Numbers and Sequence ID numbers for the modified and unmodified nucleotide
sequences. (Shown without Linking Agents or Conjugates)

| | AS | | | SS | |
|---|---|---|---|---|---|
| | modified | AS | | modified | SS |
| | SEQ ID | unmodified | | SEQ ID | unmodified |
| AS ID | NO: | SEQ ID NO: | SS ID | NO: | SEQ ID NO: |
| AM08523-AS | 337 | 629 | AM08522-SS-NL | 458 | 682 |
| AM08525-AS | 338 | 630 | AM08524-SS-NL | 459 | 683 |
| AM08527-AS | 339 | 631 | AM08526-SS-NL | 460 | 684 |
| AM08529-AS | 340 | 632 | AM08528-SS-NL | 461 | 685 |
| AM08531-AS | 341 | 633 | AM08530-SS-NL | 462 | 686 |
| AM08533-AS | 342 | 634 | AM08532-SS-NL | 463 | 687 |
| AM08535-AS | 343 | 635 | AM08534-SS-NL | 464 | 688 |
| AM08537-AS | 344 | 636 | AM08536-SS-NL | 465 | 689 |
| AM08539-AS | 345 | 637 | AM08538-SS-NL | 466 | 690 |
| AM08541-AS | 346 | 638 | AM08540-SS-NL | 467 | 691 |
| AM08543-AS | 347 | 639 | AM08542-SS-NL | 468 | 692 |
| AM08545-AS | 348 | 640 | AM08544-SS-NL | 469 | 693 |
| AM08547-AS | 349 | 641 | AM08546-SS-NL | 470 | 694 |
| AM08549-AS | 350 | 642 | AM08548-SS-NL | 471 | 695 |
| AM12367-AS | 359 | 651 | AM12366-SS-NL | 472 | 696 |
| AM12369-AS | 360 | 652 | AM12368-SS-NL | 473 | 697 |
| AM12371-AS | 361 | 653 | AM12370-SS-NL | 474 | 698 |
| AM12373-AS | 362 | 654 | AM12372-SS-NL | 475 | 699 |
| AM12375-AS | 363 | 655 | AM12374-SS-NL | 476 | 700 |
| AM08539-AS | 345 | 637 | AM12376-SS-NL | 477 | 701 |
| AM12378-AS | 364 | 656 | AM12377-SS-NL | 478 | 702 |
| AM12380-AS | 365 | 657 | AM12379-SS-NL | 479 | 703 |
| AM12382-AS | 366 | 658 | AM12381-SS-NL | 480 | 704 |
| AM12384-AS | 367 | 659 | AM12383-SS-NL | 481 | 705 |
| AM12386-AS | 368 | 660 | AM12385-SS-NL | 482 | 706 |
| AM12388-AS | 369 | 661 | AM12387-SS-NL | 483 | 707 |
| AM12390-AS | 370 | 662 | AM12389-SS-NL | 484 | 708 |
| AM12392-AS | 371 | 663 | AM12391-SS-NL | 485 | 709 |
| AM12394-AS | 372 | 664 | AM12393-SS-NL | 486 | 710 |
| AM12396-AS | 373 | 665 | AM12395-SS-NL | 487 | 711 |
| AM12398-AS | 374 | 666 | AM12397-SS-NL | 488 | 712 |
| AM12400-AS | 375 | 667 | AM12399-SS-NL | 489 | 713 |
| AM12402-AS | 376 | 668 | AM12401-SS-NL | 490 | 714 |
| AM12404-AS | 377 | 669 | AM12403-SS-NL | 491 | 715 |
| AM12406-AS | 378 | 670 | AM12405-SS-NL | 492 | 716 |
| AM12408-AS | 379 | 671 | AM12407-SS-NL | 493 | 717 |
| AM12410-AS | 380 | 672 | AM12409-SS-NL | 494 | 718 |
| AM12412-AS | 381 | 673 | AM12411-SS-NL | 495 | 719 |
| AM12414-AS | 382 | 674 | AM12413-SS-NL | 496 | 720 |
| AM12416-AS | 383 | 675 | AM12415-SS-NL | 497 | 721 |
| AM12418-AS | 384 | 676 | AM12417-SS-NL | 498 | 722 |
| AM12375-AS | 363 | 655 | AM12874-SS-NL | 499 | 700 |
| AM12875-AS | 385 | 655 | AM12874-SS-NL | 499 | 700 |
| AM12877-AS | 386 | 655 | AM12876-SS-NL | 500 | 700 |
| AM13076-AS | 387 | 677 | AM13075-SS-NL | 501 | 723 |
| AM13077-AS | 388 | 668 | AM12401-SS-NL | 490 | 714 |
| AM13079-AS | 389 | 668 | AM13078-SS-NL | 502 | 714 |
| AM13079-AS | 389 | 668 | AM13080-SS-NL | 503 | 714 |
| AM13081-AS | 390 | 668 | AM13080-SS-NL | 503 | 714 |
| AM13082-AS | 391 | 668 | AM13080-SS-NL | 503 | 714 |
| AM13083-AS | 392 | 668 | AM13080-SS-NL | 503 | 714 |
| AM13083-AS | 392 | 668 | AM13084-SS-NL | 504 | 714 |
| AM13083-AS | 392 | 668 | AM13078-SS-NL | 502 | 714 |
| AM12388-AS | 369 | 661 | AM13210-SS-NL | 505 | 724 |
| AM13212-AS | 393 | 661 | AM13211-SS-NL | 506 | 724 |
| AM13212-AS | 393 | 661 | AM13213-SS-NL | 507 | 724 |
| AM13212-AS | 393 | 661 | AM13214-SS-NL | 508 | 707 |
| AM13215-AS | 394 | 666 | AM12397-SS-NL | 488 | 712 |
| AM13215-AS | 394 | 666 | AM13216-SS-NL | 509 | 712 |
| AM13215-AS | 394 | 666 | AM13217-SS-NL | 510 | 712 |
| AM13215-AS | 394 | 666 | AM13218-SS-NL | 511 | 712 |
| AM13241-AS | 395 | 674 | AM12413-SS-NL | 496 | 720 |
| AM13241-AS | 395 | 674 | AM13242-SS-NL | 512 | 720 |
| AM13244-AS | 396 | 674 | AM13243-SS-NL | 513 | 720 |
| AM13244-AS | 396 | 674 | AM13242-SS-NL | 512 | 720 |
| AM13245-AS | 397 | 674 | AM13243-SS-NL | 513 | 720 |
| AM13246-AS | 398 | 664 | AM12393-SS-NL | 486 | 710 |
| AM13247-AS | 399 | 664 | AM12393-SS-NL | 486 | 710 |
| AM13246-AS | 398 | 664 | AM13248-SS-NL | 514 | 710 |
| AM13246-AS | 398 | 664 | AM13249-SS-NL | 515 | 710 |
| AM13246-AS | 398 | 664 | AM13250-SS-NL | 516 | 710 |
| AM13400-AS | 400 | 656 | AM13399-SS-NL | 517 | 702 |
| AM13400-AS | 400 | 656 | AM13401-SS-NL | 518 | 702 |
| AM13402-AS | 401 | 656 | AM13399-SS-NL | 517 | 702 |
| AM13403-AS | 402 | 656 | AM13399-SS-NL | 517 | 702 |
| AM13405-AS | 403 | 676 | AM13404-SS-NL | 519 | 722 |
| AM13405-AS | 403 | 676 | AM13406-SS-NL | 520 | 722 |
| AM13407-AS | 404 | 676 | AM12417-SS-NL | 498 | 722 |
| AM13409-AS | 405 | 678 | AM13408-SS-NL | 521 | 725 |
| AM13241-AS | 395 | 674 | AM13762-SS-NL | 522 | 720 |
| AM13244-AS | 396 | 674 | AM13762-SS-NL | 522 | 720 |
| AM13241-AS | 395 | 674 | AM13763-SS-NL | 523 | 720 |
| AM13212-AS | 393 | 661 | AM13764-SS-NL | 524 | 724 |
| AM13212-AS | 393 | 661 | AM13765-SS-NL | 525 | 707 |
| AM14108-AS | 406 | 679 | AM14107-SS-NL | 526 | 726 |
| AM14109-AS | 407 | 661 | AM13764-SS-NL | 524 | 724 |
| AM14110-AS | 408 | 674 | AM12413-SS-NL | 496 | 720 |
| AM14112-AS | 409 | 679 | AM14111-SS-NL | 527 | 726 |
| AM14113-AS | 410 | 679 | AM14111-SS-NL | 527 | 726 |
| AM14117-AS | 411 | 661 | AM13210-SS-NL | 505 | 724 |
| AM14118-AS | 412 | 661 | AM13210-SS-NL | 505 | 724 |
| AM14119-AS | 413 | 661 | AM13213-SS-NL | 507 | 724 |
| AM14109-AS | 407 | 661 | AM13213-SS-NL | 507 | 724 |
| AM12875-AS | 385 | 655 | AM12374-SS-NL | 476 | 700 |
| AM14121-AS | 414 | 655 | AM14120-SS-NL | 528 | 700 |
| AM14122-AS | 415 | 655 | AM14120-SS-NL | 528 | 700 |
| AM12877-AS | 386 | 655 | AM14120-SS-NL | 528 | 700 |
| AM14124-AS | 416 | 680 | AM14123-SS-NL | 529 | 727 |
| AM14125-AS | 417 | 680 | AM14123-SS-NL | 529 | 727 |
| AM14126-AS | 418 | 680 | AM14123-SS-NL | 529 | 727 |
| AM14127-AS | 419 | 680 | AM14123-SS-NL | 529 | 727 |
| AM14129-AS | 420 | 681 | AM14128-SS-NL | 530 | 728 |
| AM14130-AS | 421 | 681 | AM14128-SS-NL | 530 | 728 |
| AM14131-AS | 422 | 681 | AM14128-SS-NL | 530 | 728 |
| AM14114-AS | 423 | 674 | AM13242-SS-NL | 512 | 720 |
| AM14116-AS | 424 | 679 | AM14115-SS-NL | 531 | 726 |
| AM14108-AS | 406 | 679 | AM14115-SS-NL | 531 | 726 |
| AM13246-AS | 398 | 664 | AM14553-SS-NL | 532 | 710 |
| AM14651-AS | 425 | 680 | AM14123-SS-NL | 526 | 727 |
| AM14652-AS | 426 | 664 | AM12393-SS-NL | 486 | 710 |
| AM14653-AS | 427 | 664 | AM13250-SS-NL | 516 | 710 |
| AM14654-AS | 428 | 664 | AM13250-SS-NL | 516 | 710 |
| AM14655-AS | 429 | 664 | AM13250-SS-NL | 516 | 710 |
| AM14656-AS | 430 | 664 | AM13250-SS-NL | 516 | 710 |
| AM14657-AS | 431 | 664 | AM13250-SS-NL | 516 | 710 |
| AM14658-AS | 432 | 664 | AM13250-SS-NL | 516 | 710 |
| AM14659-AS | 433 | 664 | AM13250-SS-NL | 516 | 710 |
| AM14888-AS | 434 | 664 | AM13250-SS-NL | 516 | 710 |
| AM14889-AS | 435 | 664 | AM13250-SS-NL | 516 | 710 |
| AM14888-AS | 434 | 664 | AM14553-SS-NL | 532 | 710 |
| AM14889-AS | 435 | 664 | AM14553-SS-NL | 532 | 710 |
| AM14116-AS | 424 | 679 | AM14107-SS-NL | 526 | 726 |
| AM15155-AS | 436 | 674 | AM13762-SS-NL | 522 | 720 |
| AM14114-AS | 423 | 674 | AM13762-SS-NL | 522 | 720 |
| AM14108-AS | 406 | 679 | AM15418-SS-NL | 535 | 729 |
| AM14108-AS | 406 | 679 | AM15419-SS-NL | 536 | 730 |
| AM14108-AS | 406 | 679 | AM15420-SS-NL | 537 | 726 |
| AM14655-AS | 429 | 664 | AM14553-SS-NL | 532 | 710 |
| AM14657-AS | 431 | 664 | AM14553-SS-NL | 532 | 710 |
| AM14108-AS | 406 | 679 | AM16013-SS-NL | 538 | 726 |
| AM14116-AS | 424 | 679 | AM16013-SS-NL | 538 | 726 |

TABLE 7B
MMP7 RNAi Agent Duplexes with Corresponding Sense and Antisense
Strand ID Numbers and Sequence ID numbers for the modified and unmodified nucleotide
sequences.

| | | AS | AS | | SS | SS |
|---|---|---|---|---|---|---|
| | | modified | unmodified | | modified | unmodified |
| | | SEQ ID | SEQ ID | | SEQ ID | SEQ ID |
| Duplex | AS ID | NO: | NO: | SS ID | NO: | NO: |
| AD06348 | AM08523-AS | 337 | 629 | AM08522-SS | 539 | 682 |
| AD06349 | AM08525-AS | 338 | 630 | AM08524-SS | 540 | 683 |
| AD06350 | AM08527-AS | 339 | 631 | AM08526-SS | 541 | 684 |
| AD06351 | AM08529-AS | 340 | 632 | AM08528-SS | 542 | 685 |
| AD06352 | AM08531-AS | 341 | 633 | AM08530-SS | 543 | 686 |
| AD06353 | AM08533-AS | 342 | 634 | AM08532-SS | 544 | 687 |
| AD06354 | AM08535-AS | 343 | 635 | AM08534-SS | 545 | 688 |
| AD06355 | AM08537-AS | 344 | 636 | AM08536-SS | 546 | 689 |
| AD06356 | AM08539-AS | 345 | 637 | AM08538-SS | 547 | 690 |
| AD06357 | AM08541-AS | 346 | 638 | AM08540-SS | 548 | 691 |
| AD06358 | AM08543-AS | 347 | 639 | AM08542-SS | 549 | 692 |
| AD06359 | AM08545-AS | 348 | 640 | AM08544-SS | 550 | 693 |
| AD06360 | AM08547-AS | 349 | 641 | AM08546-SS | 551 | 694 |
| AD06361 | AM08549-AS | 350 | 642 | AM08548-SS | 552 | 695 |
| AD08797 | AM12367-AS | 359 | 651 | AM12366-SS | 553 | 696 |
| AD08798 | AM12369-AS | 360 | 652 | AM12368-SS | 554 | 697 |
| AD08799 | AM12371-AS | 361 | 653 | AM12370-SS | 555 | 698 |
| AD08800 | AM12373-AS | 362 | 654 | AM12372-SS | 556 | 699 |
| AD08801 | AM12375-AS | 363 | 655 | AM12374-SS | 557 | 700 |
| AD08802 | AM08539-AS | 345 | 637 | AM12376-SS | 558 | 701 |
| AD08803 | AM12378-AS | 364 | 656 | AM12377-SS | 559 | 702 |
| AD08804 | AM12380-AS | 365 | 657 | AM12379-SS | 560 | 703 |
| AD08805 | AM12382-AS | 366 | 658 | AM12381-SS | 561 | 704 |
| AD08806 | AM12384-AS | 367 | 659 | AM12383-SS | 562 | 705 |
| AD08807 | AM12386-AS | 368 | 660 | AM12385-SS | 563 | 706 |
| AD08808 | AM12388-AS | 369 | 661 | AM12387-SS | 564 | 707 |
| AD08809 | AM12390-AS | 370 | 662 | AM12389-SS | 565 | 708 |
| AD08810 | AM12392-AS | 371 | 663 | AM12391-SS | 566 | 709 |
| AD08811 | AM12394-AS | 372 | 664 | AM12393-SS | 567 | 710 |
| AD08812 | AM12396-AS | 373 | 665 | AM12395-SS | 568 | 711 |
| AD08813 | AM12398-AS | 374 | 666 | AM12397-SS | 569 | 712 |
| AD08814 | AM12400-AS | 375 | 667 | AM12399-SS | 570 | 713 |
| AD08815 | AM12402-AS | 376 | 668 | AM12401-SS | 571 | 714 |
| AD08816 | AM12404-AS | 377 | 669 | AM12403-SS | 572 | 715 |
| AD08817 | AM12406-AS | 378 | 670 | AM12405-SS | 573 | 716 |
| AD08818 | AM12408-AS | 379 | 671 | AM12407-SS | 574 | 717 |
| AD08819 | AM12410-AS | 380 | 672 | AM12409-SS | 575 | 718 |
| AD08820 | AM12412-AS | 381 | 673 | AM12411-SS | 576 | 719 |
| AD08821 | AM12414-AS | 382 | 674 | AM12413-SS | 577 | 720 |
| AD08822 | AM12416-AS | 383 | 675 | AM12415-SS | 578 | 721 |
| AD08823 | AM12418-AS | 384 | 676 | AM12417-SS | 579 | 722 |
| AD09128 | AM12375-AS | 363 | 655 | AM12874-SS | 580 | 700 |
| AD09129 | AM12875-AS | 385 | 655 | AM12874-SS | 580 | 700 |
| AD09130 | AM12877-AS | 386 | 655 | AM12876-SS | 581 | 700 |
| AD09242 | AM13076-AS | 387 | 677 | AM13075-SS | 582 | 723 |
| AD09243 | AM13077-AS | 388 | 668 | AM12401-SS | 571 | 714 |
| AD09244 | AM13079-AS | 389 | 668 | AM13078-SS | 583 | 714 |
| AD09245 | AM13079-AS | 389 | 668 | AM13080-SS | 584 | 714 |
| AD09246 | AM13081-AS | 390 | 668 | AM13080-SS | 584 | 714 |
| AD09247 | AM13082-AS | 391 | 668 | AM13080-SS | 584 | 714 |
| AD09248 | AM13083-AS | 392 | 668 | AM13080-SS | 584 | 714 |
| AD09249 | AM13083-AS | 392 | 668 | AM13084-SS | 585 | 714 |
| AD09250 | AM13083-AS | 392 | 668 | AM13078-SS | 583 | 714 |
| AD09330 | AM12388-AS | 369 | 661 | AM13210-SS | 586 | 724 |
| AD09331 | AM13212-AS | 393 | 661 | AM13211-SS | 587 | 724 |
| AD09332 | AM13212-AS | 393 | 661 | AM13213-SS | 588 | 724 |
| AD09333 | AM13212-AS | 393 | 661 | AM13214-SS | 589 | 707 |
| AD09334 | AM13215-AS | 394 | 666 | AM12397-SS | 569 | 712 |
| AD09335 | AM13215-AS | 394 | 666 | AM13216-SS | 590 | 712 |
| AD09336 | AM13215-AS | 394 | 666 | AM13217-SS | 591 | 712 |
| AD09337 | AM13215-AS | 394 | 666 | AM13218-SS | 592 | 712 |
| AD09349 | AM13241-AS | 395 | 674 | AM12413-SS | 577 | 720 |
| AD09350 | AM13241-AS | 395 | 674 | AM13242-SS | 593 | 720 |
| AD09351 | AM13244-AS | 396 | 674 | AM13243-SS | 594 | 720 |
| AD09352 | AM13244-AS | 396 | 674 | AM13242-SS | 593 | 720 |
| AD09353 | AM13245-AS | 397 | 674 | AM13243-SS | 594 | 720 |
| AD09354 | AM13246-AS | 398 | 664 | AM12393-SS | 567 | 710 |
| AD09355 | AM13247-AS | 399 | 664 | AM12393-SS | 567 | 710 |
| AD09356 | AM13246-AS | 398 | 664 | AM13248-SS | 595 | 710 |
| AD09357 | AM13246-AS | 398 | 664 | AM13249-SS | 596 | 710 |
| AD09358 | AM13246-AS | 398 | 664 | AM13250-SS | 597 | 710 |
| AD09441 | AM13400-AS | 400 | 656 | AM13399-SS | 598 | 702 |
| AD09442 | AM13400-AS | 400 | 656 | AM13401-SS | 599 | 702 |
| AD09443 | AM13402-AS | 401 | 656 | AM13399-SS | 598 | 702 |
| AD09444 | AM13403-AS | 402 | 656 | AM13399-SS | 598 | 702 |
| AD09445 | AM13405-AS | 403 | 676 | AM13404-SS | 600 | 722 |
| AD09446 | AM13405-AS | 403 | 676 | AM13406-SS | 601 | 722 |
| AD09447 | AM13407-AS | 404 | 676 | AM12417-SS | 579 | 722 |
| AD09448 | AM13409-AS | 405 | 678 | AM13408-SS | 602 | 725 |
| AD09666 | AM13241-AS | 395 | 674 | AM13762-SS | 603 | 720 |
| AD09667 | AM13244-AS | 396 | 674 | AM13762-SS | 603 | 720 |
| AD09668 | AM13241-AS | 395 | 674 | AM13763-SS | 604 | 720 |
| AD09669 | AM13212-AS | 393 | 661 | AM13764-SS | 605 | 724 |
| AD09670 | AM13212-AS | 393 | 661 | AM13765-SS | 606 | 707 |
| AD09887 | AM14108-AS | 406 | 679 | AM14107-SS | 607 | 726 |
| AD09888 | AM14109-AS | 407 | 661 | AM13764-SS | 605 | 724 |
| AD09889 | AM14110-AS | 408 | 674 | AM12413-SS | 577 | 720 |
| AD09890 | AM14112-AS | 409 | 679 | AM14111-SS | 608 | 726 |
| AD09891 | AM14113-AS | 410 | 679 | AM14111-SS | 608 | 726 |
| AD09892 | AM14117-AS | 411 | 661 | AM13210-SS | 586 | 724 |
| AD09893 | AM14118-AS | 412 | 661 | AM13210-SS | 586 | 724 |
| AD09894 | AM14119-AS | 413 | 661 | AM13213-SS | 588 | 724 |
| AD09895 | AM14109-AS | 407 | 661 | AM13213-SS | 588 | 724 |
| AD09896 | AM12875-AS | 385 | 655 | AM12374-SS | 557 | 700 |
| AD09897 | AM14121-AS | 414 | 655 | AM14120-SS | 609 | 700 |
| AD09898 | AM14122-AS | 415 | 655 | AM14120-SS | 609 | 700 |
| AD09899 | AM12877-AS | 386 | 655 | AM14120-SS | 609 | 700 |
| AD09900 | AM14124-AS | 416 | 680 | AM14123-SS | 610 | 727 |
| AD09901 | AM14125-AS | 417 | 680 | AM14123-SS | 610 | 727 |
| AD09902 | AM14126-AS | 418 | 680 | AM14123-SS | 610 | 727 |
| AD09903 | AM14127-AS | 419 | 680 | AM14123-SS | 610 | 727 |
| AD09904 | AM14129-AS | 420 | 681 | AM14128-SS | 611 | 728 |
| AD09905 | AM14130-AS | 421 | 681 | AM14128-SS | 611 | 728 |
| AD09906 | AM14131-AS | 422 | 681 | AM14128-SS | 611 | 728 |
| AD09907 | AM14114-AS | 423 | 674 | AM13242-SS | 593 | 720 |
| AD09908 | AM14116-AS | 424 | 679 | AM14115-SS | 612 | 726 |
| AD09909 | AM14108-AS | 406 | 679 | AM14115-SS | 612 | 726 |
| AD10212 | AM13246-AS | 398 | 664 | AM14553-SS | 613 | 710 |
| AD10284 | AM14651-AS | 425 | 680 | AM14123-SS | 610 | 727 |
| AD10285 | AM14652-AS | 426 | 664 | AM12393-SS | 567 | 710 |
| AD10286 | AM14653-AS | 427 | 664 | AM13250-SS | 597 | 710 |
| AD10287 | AM14654-AS | 428 | 664 | AM13250-SS | 597 | 710 |
| AD10288 | AM14655-AS | 429 | 664 | AM13250-SS | 597 | 710 |
| AD10289 | AM14656-AS | 430 | 664 | AM13250-SS | 597 | 710 |
| AD10290 | AM14657-AS | 431 | 664 | AM13250-SS | 597 | 710 |
| AD10291 | AM14658-AS | 432 | 664 | AM13250-SS | 597 | 710 |
| AD10292 | AM14659-AS | 433 | 664 | AM13250-SS | 597 | 710 |
| AD10438 | AM14888-AS | 434 | 664 | AM13250-SS | 597 | 710 |
| AD10439 | AM14889-AS | 435 | 664 | AM13250-SS | 597 | 710 |
| AD10441 | AM14888-AS | 434 | 664 | AM14553-SS | 613 | 710 |
| AD10442 | AM14889-AS | 435 | 664 | AM14553-SS | 613 | 710 |
| AD10637 | AM14116-AS | 424 | 679 | AM14107-SS | 607 | 726 |
| AD10638 | AM15155-AS | 436 | 674 | AM13762-SS | 603 | 720 |
| AD10639 | AM14114-AS | 423 | 674 | AM13762-SS | 603 | 720 |
| AD10815 | AM14108-AS | 406 | 679 | AM15418-SS | 615 | 729 |
| AD10816 | AM14108-AS | 406 | 679 | AM15419-SS | 616 | 730 |
| AD10817 | AM14108-AS | 406 | 679 | AM15420-SS | 617 | 726 |
| AD10879 | AM14655-AS | 429 | 664 | AM14553-SS | 613 | 710 |
| AD10880 | AM14657-AS | 431 | 664 | AM14553-SS | 613 | 710 |

TABLE 8
MMP7 RNAi Agent Duplexes with Corresponding Sense and Antisense
Strand ID Numbers and Sequence ID numbers for the modified and unmodified nucleotide
sequences. (Shown with Targeting Ligand Conjugates)

| | | AS | AS | | SS | SS |
|---|---|---|---|---|---|---|
| | | modified | unmodified | | modified | unmodified |
| | | SEQ ID | SEQ ID | | SEQ ID | SEQ ID |
| Duplex | AS ID | NO: | NO: | SS ID | NO: | NO: |
| AC001271 | AM12375-AS | 363 | 655 | CS001585 | 618 | 700 |
| AC001272 | AM12875-AS | 385 | 655 | CS001585 | 618 | 700 |
| AC001273 | AM12877-AS | 386 | 655 | CS001588 | 619 | 700 |
| AC001513 | AM13241-AS | 395 | 674 | CS001941 | 620 | 720 |
| AC001514 | AM13244-AS | 396 | 674 | CS001941 | 620 | 720 |
| AC001515 | AM13241-AS | 395 | 674 | CS001944 | 621 | 720 |
| AC001516 | AM13212-AS | 393 | 661 | CS001945 | 622 | 724 |
| AC001517 | AM13212-AS | 393 | 661 | CS001947 | 623 | 707 |
| AC001651 | AM14108-AS | 406 | 679 | CS002133 | 628 | 726 |
| AC001652 | AM14109-AS | 407 | 661 | CS001945 | 622 | 724 |
| AC001875 | AM13246-AS | 398 | 664 | CS002396 | 624 | 710 |
| AC002023 | AM14888-AS | 434 | 664 | CS002396 | 624 | 710 |
| AC002024 | AM14889-AS | 435 | 664 | CS002396 | 624 | 710 |
| AC002085 | AM14116-AS | 424 | 679 | CS002133 | 628 | 726 |
| AC002086 | AM15155-AS | 436 | 674 | CS001941 | 620 | 720 |
| AC002087 | AM14114-AS | 423 | 674 | CS001941 | 620 | 720 |
| AC002217 | AM14655-AS | 429 | 664 | CS002396 | 624 | 710 |
| AC002218 | AM14657-AS | 431 | 664 | CS002396 | 624 | 710 |
| AC002219 | AM14108-AS | 406 | 679 | CS002805 | 625 | 729 |
| AC002220 | AM14108-AS | 406 | 679 | CS002806 | 626 | 730 |
| AC002221 | AM14108-AS | 406 | 679 | CS002807 | 627 | 726 |

TABLE 9
Conjugate Duplex ID Numbers Referencing Position
Targeted On MMP7 (MMP7) Gene

| | | | | Targeted |
|---|---|---|---|---|
| | | | | MMP7 |
| | | | | Gene |
| | | | | Position |
| | | | | (Of SEQ |
| Duplex | AS ID | SS ID | Duplex | ID NO: 1) |
| AC001271 | AM12375-AS | CS001585 | AD09128 | 304 |
| AC001272 | AM12875-AS | CS001585 | AD09129 | 304 |
| AC001273 | AM12877-AS | CS001588 | AD09130 | 304 |
| AC001513 | AM13241-AS | CS001941 | AD09666 | 971 |
| AC001514 | AM13244-AS | CS001941 | AD09667 | 971 |
| AC001515 | AM13241-AS | CS001944 | AD09668 | 971 |
| AC001516 | AM13212-AS | CS001945 | AD09669 | 418 |
| AC001517 | AM13212-AS | CS001947 | AD09670 | 418 |
| AC001651 | AM14108-AS | CS002133 | AD09887 | 971 |
| AC001652 | AM14109-AS | CS001945 | AD09888 | 418 |
| AC001875 | AM13246-AS | CS002396 | AD10212 | 735 |
| AC002023 | AM14888-AS | CS002396 | AD10441 | 735 |
| AC002024 | AM14889-AS | CS002396 | AD10442 | 735 |
| AC002085 | AM14116-AS | CS002133 | AD10637 | 971 |
| AC002086 | AM15155-AS | CS001941 | AD10638 | 971 |
| AC002087 | AM14114-AS | CS001941 | AD10639 | 971 |
| AC002217 | AM14655-AS | CS002396 | AD10879 | 735 |
| AC002218 | AM14657-AS | CS002396 | AD10880 | 735 |
| AC002219 | AM14108-AS | CS002805 | AD10815 | 971 |
| AC002220 | AM14108-AS | CS002806 | AD10816 | 971 |
| AC002221 | AM14108-AS | CS002807 | AD10817 | 971 |

TABLE 10
Conjugate ID Numbers With Chemically Modified Antisense
and Sense Strands (including Linkers and Conjugates)

| | Sense Strand (Fully | | | |
|---|---|---|---|---|
| AC ID | Modified with Conjugated | SEQ ID | | SEQ ID |
| Number | Targeting Ligand)(5′ → 3′) | NO: | Antisense Strand (5′ → 3′) | NO: |
| AC001271 | Tri-SM6.1-αvβ6-(TA14) | 618 | usAfsasCfaUfcUfgGfcAfcUfcC | 363 |
| | gsauguggaGfUfGfccagauguuas(invAb) | | faCfaUfsc | |
| AC001272 | Tri-SM6.1-αvβ6-(TA14) | 618 | cPrpusAfsasCfaUfcUfgGfcAfc | 385 |
| | gsauguggaGfUfGfccagauguuas(invAb) | | UfcCfaCfaUfsc | |
| AC001273 | Tri-SM6.1-αvβ6-(TA14) | 619 | cPrpuAfacaucuggcAfcUfcCfac | 386 |
| | gsauguggaGfuGfcCfagauguuas(invAb) | | ausc | |
| AC001513 | Tri-SM6.1-αvβ6-(TA14) | 620 | asGfsascauucaaaAfaCfcAfacu | 395 |
| | gscaguuggUfuUfuUfgaaugucus(invAb) | | gsc | |
| AC001514 | Tri-SM6.1-αvβ6-(TA14) | 620 | asGfsascauucAfaaAfaCfcAfac | 396 |
| | gscaguuggUfuUfuUfgaaugucus(invAb) | | ugsc | |
| AC001515 | Tri-SM6.1-αvβ6-(TA14) | 621 | asGfsascauucaaaAfaCfcAfacu | 395 |
| | gscaguuggUfUfUfuugaaugucus(invAb) | | gsc | |
| AC001516 | Tri-SM6.1-αvβ6-(TA14) | 622 | usUfsgsacacUfaAfuCfgAfuCfc | 393 |
| | csaguggauCfgAfuUfagugucaas(invAb) | | acusg | |
| AC001517 | Tri-SM6.1-αvβ6-(TA14) | 623 | usUfsgsacacUfaAfuCfgAfuCfc | 393 |
| | csaguggauCfgAfuUfaguiucaas(invAb) | | acusg | |
| AC001875 | Tri-SM6.1-αvβ6-(TA14) | 624 | asUfsasgguuggauAfcAfuCfacu | 398 |
| | gscagugauGfuAfuCfcaaccuaus(invAb) | | gsc | |
| AC002217 | Tri-SM6.1-αvβ6-(TA14) | 624 | cPrpasUfsaGfguuggauAfcAfuC | 429 |
| | gscagugauGfuAfuCfcaaccuaus(invAb) | | facusgsc | |
| AC002218 | Tri-SM6.1-αvβ6-(TA14) | 624 | cPrpasUfsagGfuuggauAfcAfuC | 431 |
| | gscagugauGfuAfuCfcaaccuaus(invAb) | | facusgsc | |
| AC002219 | Tri-SM6.1-αvβ6-(TA14) | 625 | cPrpuGfacauucAfaaAfaCfcAfa | 406 |
| | gscguuggUfuUfuUfgaaugucas(invAb) | | cugsc | |
| AC002220 | Tri-SM6.1-αvβ6-(TA14) | 626 | cPrpuGfacauucAfaaAfaCfcAfa | 406 |
| | gscaguugggUfuUfuUfgaaugucas(invAb) | | cugsc | |
| AC002221 | Tri-SM6.1-αvβ6-(TA14) | 627 | cPrpuGfacauucAfaaAfaCfcAfa | 406 |
| | gscaguuggUfuUfuUfgaauguca(invAb) | | cugsc | |
| AC001651 | Tri-SM6.1-αvβ6-(TA14) | 628 | cPrpuGfacauucAfaaAfaCfcAfa | 406 |
| | gscaguuggUfuUfuUfgaaugucas(invAb) | | cugsc | |
| AC001652 | Tri-SM6.1-αvβ6-(TA14) | 622 | cPrpuUfgacacUfaAfuCfgAfuCf | 407 |
| | csaguggauCfgAfuUfagugucaas(invAb) | | cacusg | |
| AC002085 | Tri-SM6.1-αvβ6-(TA14) | 628 | cPrpusGfsascauucAfaaAfaCfc | 424 |
| | gscaguuggUfuUfuUfgaaugucas(invAb) | | Afacugsc | |
| AC002086 | Tri-SM6.1-αvβ6-(TA14) | 620 | cPrpaGfacauucAfaaAfaCfcAfa | 436 |
| | gscaguuggUfuUfuUfgaaugucus(invAb) | | cugsc | |
| AC002087 | Tri-SM6.1-αvβ6-(TA14) | 620 | cPrpasGfsascauucAfaaAfaCfc | 423 |
| | gscaguuggUfuUfuUfgaaugucus(invAb) | | Afacugsc | |
| AC002023 | Tri-SM6.1-αvβ6-(TA14) | 624 | cPrpasUfsasgguuggauAfcAfuC | 434 |
| | gscagugauGfuAfuCfcaaccuaus(invAb) | | facugsc | |
| AC002024 | Tri-SM6.1-αvβ6-(TA14) | 624 | cPrpaUfagguuggauAfcAfuCfac | 435 |
| | gscagugauGfuAfuCfcaaccuaus(invAb) | | ugsc | |

[0185] In some embodiments, a MMP7 RNAi agent is prepared or provided as a salt, mixed salt, or a free-acid. In some embodiments, a MMP7 RNAi agent is prepared or provided as a pharmaceutically acceptable salt. In some embodiments, a MMP7 RNAi agent is prepared or provided as a pharmaceutically acceptable sodium or potassium salt The RNAi agents described herein, upon delivery to a cell expressing an MMP7 gene, inhibit or knockdown expression of one or more MMP7 genes in vivo and/or in vitro.

### Targeting Groups, Linking Groups, Pharmacokinetic/Pharmacodynamic (PK/PD) Modulators, and Delivery Vehicles

[0186] In some embodiments, a MMP7 RNAi agent contains or is conjugated to one or more non-nucleotide groups including, but not limited to, a targeting group, a linking group, a pharmacokinetic/pharmacodynamic (PK/PD) modulator, a delivery polymer, or a delivery vehicle. The non-nucleotide group can enhance targeting, delivery, or attachment of the RNAi agent. The non-nucleotide group can be covalently linked to the 3′ and/or 5′ end of either the sense strand and/or the antisense strand. In some embodiments, a MMP7 RNAi agent contains a non-nucleotide group linked to the 3′ and/or 5′ end of the sense strand. In some embodiments, a non-nucleotide group is linked to the 5′ end of a MMP7 RNAi agent sense strand. A non-nucleotide group can be linked directly or indirectly to the RNAi agent via a linker/linking group. In some embodiments, a non-nucleotide group is linked to the RNAi agent via a labile, cleavable, or reversible bond or linker.

[0187] In some embodiments, a non-nucleotide group enhances the pharmacokinetic or biodistribution properties of an RNAi agent or conjugate to which it is attached to improve cell- or tissue-specific distribution and cell-specific uptake of the conjugate. In some embodiments, a non-nucleotide group enhances endocytosis of the RNAi agent.

[0188] Targeting groups or targeting moieties enhance the pharmacokinetic or biodistribution properties of a conjugate or RNAi agent to which they are attached to improve cell-specific (including, in some cases, organ specific) distribution and cell-specific (or organ specific) uptake of the conjugate or RNAi agent. A targeting group can be monovalent, divalent, trivalent, tetravalent, or have higher valency for the target to which it is directed. Representative targeting groups include, without limitation, compounds with affinity to cell surface molecule, cell receptor ligands, hapten, antibodies, monoclonal antibodies, antibody fragments, and antibody mimics with affinity to cell surface molecules. In some embodiments, a targeting group is linked to an RNAi agent using a linker, such as a PEG linker or one, two, or three abasic and/or ribitol (abasic ribose) residues, which in some instances can serve as linkers.

[0189] A targeting group, with or without a linker, can be attached to the 5′ or 3′ end of any of the sense and/or antisense strands disclosed in Tables 2, 3, 4, 5, 6, and 10. A linker, with or without a targeting group, can be attached to the 5′ or 3′ end of any of the sense and/or antisense strands disclosed in Tables 2, 3, 4, 5, 6, and 10.

[0190] The MMP7 RNAi agents described herein can be synthesized having a reactive group, such as an amino group (also referred to herein as an amine), at the 5′-terminus and/or the 3′-terminus. The reactive group can be used subsequently to attach a targeting moiety using methods typical in the art.

[0191] For example, in some embodiments, the MMP7 RNAi agents disclosed herein are synthesized having an NH₂-C₆ group at the 5′-terminus of the sense strand of the RNAi agent. The terminal amino group subsequently can be reacted to form a conjugate with, for example, a group that includes an αvβ6 integrin targeting ligand. In some embodiments, the MMP7 RNAi agents disclosed herein are synthesized having one or more alkyne groups at the 5′-terminus of the sense strand of the RNAi agent. The terminal alkyne group(s) can subsequently be reacted to form a conjugate with, for example, a group that includes an αvβ6 integrin targeting ligand.

[0192] In some embodiments, a targeting group comprises an integrin targeting ligand. In some embodiments, an integrin targeting ligand is an αvβ6 integrin targeting ligand. The use of an αvβ6 integrin targeting ligand facilitates cell-specific targeting to cells having αvβ6 on its respective surface, and binding of the integrin targeting ligand can facilitate entry of the therapeutic agent, such as an RNAi agent, to which it is linked, into cells such as epithelial cells, including pulmonary epithelial cells and renal epithelial cells. Integrin targeting ligands can be monomeric or monovalent (e.g., having a single integrin targeting moiety) or multimeric or multivalent (e.g., having multiple integrin targeting moieties). The targeting group can be attached to the 3′ and/or 5′ end of the RNAi oligonucleotide using methods known in the art. The preparation of targeting groups, such as αvβ6 integrin targeting ligands, is described, for example, in International Patent Application Publication No. WO 2018/085415 and in International Patent Application Publication No. WO 2019/089765, the contents of each of which are incorporated herein in its entirety.

[0193] In some embodiments, targeting groups are linked to the MMP7 RNAi agents without the use of an additional linker. In some embodiments, the targeting group is designed having a linker readily present to facilitate the linkage to a MMP7 RNAi agent. In some embodiments, when two or more RNAi agents are included in a composition, the two or more RNAi agents can be linked to their respective targeting groups using the same linkers. In some embodiments, when two or more RNAi agents are included in a composition, the two or more RNAi agents are linked to their respective targeting groups using different linkers.

[0194] In some embodiments, a linking group is conjugated to the RNAi agent. The linking group facilitates covalent linkage of the agent to a targeting group, pharmacokinetic modulator, delivery polymer, or delivery vehicle. The linking group can be linked to the 3′ and/or the 5′ end of the RNAi agent sense strand or antisense strand. In some embodiments, the linking group is linked to the RNAi agent sense strand. In some embodiments, the linking group is conjugated to the 5′ or 3′ end of an RNAi agent sense strand. In some embodiments, a linking group is conjugated to the 5′ end of an RNAi agent sense strand. Examples of linking groups, include but are not limited to: C6-SS-C6, 6-SS-6, reactive groups such a primary amines (e.g., NH2-C6) and alkynes, alkyl groups, abasic residues/nucleotides, amino acids, tri-alkyne functionalized groups, ribitol, and/or PEG groups. Examples of certain linking groups are provided in Table 11.

[0195] A linker or linking group is a connection between two atoms that links one chemical group (such as an RNAi agent) or segment of interest to another chemical group (such as a targeting group, pharmacokinetic modulator, or delivery polymer) or segment of interest via one or more covalent bonds. A labile linkage contains a labile bond. A linkage can optionally include a spacer that increases the distance between the two joined atoms. A spacer may further add flexibility and/or length to the linkage. Spacers include, but are not be limited to, alkyl groups, alkenyl groups, alkynyl groups, aryl groups, aralkyl groups, aralkenyl groups, and aralkynyl groups; each of which can contain one or more heteroatoms, heterocycles, amino acids, nucleotides, and saccharides. Spacer groups are well known in the art and the preceding list is not meant to limit the scope of the description. In some embodiments, a MMP7 RNAi agent is conjugated to a polyethylene glycol (PEG) moiety, or to a hydrophobic group having 12 or more carbon atoms, such as a cholesterol or palmitoyl group.

[0196] In some embodiments, a MMP7 RNAi agent is linked to one or more pharmacokinetic/pharmacodynamic (PK/PD) modulators. PK/PD modulators can increase circulation time of the conjugated drug and/or increase the activity of the RNAi agent through improved cell receptor binding, improved cellular uptake, and/or other means. Various PK/PD modulators suitable for use with RNAi agents are known in the art. In some embodiments, the PK/PD modulatory can be cholesterol or cholesteryl derivatives, or in some circumstances a PK/PD modulator can be comprised of alkyl groups, alkenyl groups, alkynyl groups, aryl groups, aralkyl groups, aralkenyl groups, or aralkynyl groups, each of which may be linear, branched, cyclic, and/or substituted or unsubstituted. In some embodiments, the location of attachment for these moieties is at the 5′ or 3′ end of the sense strand, at the 2′ position of the ribose ring of any given nucleotide of the sense strand, and/or attached to the phosphate or phosphorothioate backbone at any position of the sense strand.

[0197] Any of the MMP7 RNAi agent nucleotide sequences listed in Tables 2, 3, 4, 5, 6, and 10, whether modified or unmodified, can contain 3′ and/or 5′ targeting group(s), linking group(s), and/or PK/PD modulator(s). Any of the MMP7 RNAi agent sequences listed in Tables 3, 4, 5, 6, and 10, or are otherwise described herein, which contain a 3′ or 5′ targeting group, linking group, and/or PK/PD modulator can alternatively contain no 3′ or 5′ targeting group, linking group, or PK/PD modulator, or can contain a different 3′ or 5′ targeting group, linking group, or pharmacokinetic modulator including, but not limited to, those depicted in Table 11. Any of the MMP7 RNAi agent duplexes listed in Tables 7A, 7B, 8, 9 and 10, whether modified or unmodified, can further comprise a targeting group or linking group, including, but not limited to, those depicted in Table 11, and the targeting group or linking group can be attached to the 3′ or 5′ terminus of either the sense strand or the antisense strand of the MMP7 RNAi agent duplex.

[0198] Examples of certain modified nucleotides, capping moieties, and linking groups are provided in Table 11.

TABLE 11
Structures Representing Various Modified Nucleotides, Capping Moieties, and
Linking Groups (wherein [symbol] indicates the point of connection)

| | |
|---|---|
| [chemical structure] | [chemical structure] |
| cPrpus | cPrpu |
| [chemical structure] | [chemical structure] |
| cPrpas | cPrpa |
| [chemical structure] | [chemical structure] |
| a_2N | a_2Ns |
| When positioned internally: | When positioned internally: |
| linkage towards 5′ end | linkage towards 5′ end |
| [chemical structure] | [chemical structure] |
| linkage towards 3′ end | linkage towards 3′ end |
| (invAb) | (invAb)s |

When positioned at the 3′ terminal end:
linkage towards 5′ end

[chemical structure]

(invAb)
When positioned at the 3′ terminal end:

[chemical structure]

linkage towards 5′ end
(C6-SS-C6)
When positioned internally:
linkage towards 5′ end

[chemical structure]

linkage towards 3′ end
(C6-SS-C6)
When positioned at the 3′ terminal end:

[chemical structure]

linkage towards 5′ end
(6-SS-6)
When positioned internally:
linkage towards 5′ end

[chemical structure]

linkage towards 3′ end
(6-SS-6)

| | |
|---|---|
| [chemical structure] | [chemical structure] |
| (NH2-C6) | (NH2-C6)s |
| [chemical structure] | [chemical structure] |
| -C6- | -C6s- |

[chemical structure]

-L6-C6-

[chemical structure]

-L6-C6s-

[chemical structure]

-Alk-cyHex-

[chemical structure]

-Alk-cyHexs-

[chemical structure]

(TriAlk14)

[chemical structure]

(TriAlk14)s

[chemical structure]

(TA14)

[chemical structure]

(TA14)s

[chemical structure]

SM6.1-ανβ6

[chemical structure]

(NAG37)s

[0199] Alternatively, other linking groups known in the art may be used. In many instances, linking groups can be commercially acquired or alternatively, are incorporated into commercially available nucleotide phosphoramidites. (See, e.g., International Patent Application Publication No. WO 2019/161213, which is incorporated herein by reference in its entirety).

[0200] In some embodiments, a MMP7 RNAi agent is delivered without being conjugated to a targeting ligand or pharmacokinetic/pharmacodynamic (PK/PD) modulator (referred to as being “naked” or a “naked RNAi agent”).

[0201] In some embodiments, a MMP7 RNAi agent is conjugated to a targeting group, a linking group, a PK modulator, and/or another non-nucleotide group to facilitate delivery of the MMP7 RNAi agent to the cell or tissue of choice, for example, to an epithelial cell in vivo. In some embodiments, a MMP7 RNAi agent is conjugated to a targeting group wherein the targeting group includes an integrin targeting ligand. In some embodiments, the integrin targeting ligand is an αvβ6 integrin targeting ligand. In some embodiments, a targeting group includes one or more αvβ6 integrin targeting ligands.

[0202] In some embodiments, a delivery vehicle may be used to deliver an RNAi agent to a cell or tissue. A delivery vehicle is a compound that improves delivery of the RNAi agent to a cell or tissue. A delivery vehicle can include, or consist of, but is not limited to: a polymer, such as an amphipathic polymer, a membrane active polymer, a peptide, a melittin peptide, a melittin-like peptide (MLP), a lipid, a reversibly modified polymer or peptide, or a reversibly modified membrane active polyamine.

[0203] In some embodiments, the RNAi agents can be combined with lipids, nanoparticles, polymers, liposomes, micelles, DPCs or other delivery systems available in the art for nucleic acid delivery. The RNAi agents can also be chemically conjugated to targeting groups, lipids (including, but not limited to cholesteryl and cholesteryl derivatives), encapsulating in nanoparticles, liposomes, micelles, conjugating to polymers or DPCs (see, for example WO 2000/053722, WO 2008/022309, WO 2011/104169, and WO 2012/083185, WO 2013/032829, WO 2013/158141, each of which is incorporated herein by reference), by iontophoresis, or by incorporation into other delivery vehicles or systems available in the art such as hydrogels, cyclodextrins, biodegradable nanocapsules, bioadhesive microspheres, or proteinaceous vectors. In some embodiments the RNAi agents can be conjugated to antibodies having affinity for pulmonary epithelial cells. In some embodiments, the RNAi agents can be linked to targeting ligands that have affinity for pulmonary epithelial cells or receptors present on pulmonary epithelial cells.

### Pharmaceutical Compositions and Formulations

[0204] The MMP7 RNAi agents disclosed herein can be prepared as pharmaceutical compositions (alternatively referred to as pharmaceutical formulations or medicaments). The pharmaceutical compositions disclosed herein include at least one MMP7 RNAi agent. These pharmaceutical compositions are particularly useful in the inhibition of the expression of MMP7 mRNA in a target cell, a group of cells, a tissue, or an organism. The pharmaceutical compositions can be used to treat a subject having a disease, disorder, or condition that would benefit from reduction in the level of the target mRNA, or inhibition in expression of the target gene. The pharmaceutical compositions can be used to treat a subject at risk of developing a disease or disorder that would benefit from reduction of the level of the target mRNA or an inhibition in expression the target gene. In one embodiment, the method includes administering a MMP7 RNAi agent linked to a targeting ligand as described herein, to a subject to be treated. In some embodiments, one or more pharmaceutically acceptable excipients (including vehicles, carriers, diluents, and/or delivery polymers) are added to the pharmaceutical compositions that include a MMP7 RNAi agent, thereby forming a pharmaceutical formulation or medicament suitable for in vivo delivery to a subject, including a human.

[0205] The pharmaceutical compositions that include a MMP7 RNAi agent and methods disclosed herein decrease the level of the target mRNA in a cell, group of cells, group of cells, tissue, organ, or subject, including by administering to the subject a therapeutically effective amount of a herein described MMP7 RNAi agent, thereby inhibiting the expression of MMP7 mRNA in the subject. In some embodiments, the subject has been previously identified or diagnosed as having a disease or disorder that can be mediated at least in part by a reduction in MMP7 expression. In some embodiments, the subject has been previously diagnosed with having one or more pulmonary diseases such as idiopathic pulmonary fibrosis (IPF), asthma (including severe asthma), acute respiratory distress syndrome, lung cancer, chronic inflammation, interstitial lung diseases (ILD), or another type of fibrosis. In some embodiments, the subject has been previously diagnosed with having IPF.

[0206] Embodiments of the present disclosure include pharmaceutical compositions for delivering a MMP7 RNAi agent to a pulmonary epithelial cell in vivo. Such pharmaceutical compositions can include, for example, a MMP7 RNAi agent conjugated to a targeting group that comprises an integrin targeting ligand. In some embodiments, the integrin targeting ligand is comprised of an αvβ6 integrin ligand.

[0207] In some embodiments, the described pharmaceutical compositions including a MMP7 RNAi agent are used for treating or managing clinical presentations in a subject that would benefit from the inhibition of expression of MMP7. In some embodiments, a therapeutically or prophylactically effective amount of one or more of pharmaceutical compositions is administered to a subject in need of such treatment. In some embodiments, administration of any of the disclosed MMP7 RNAi agents can be used to decrease the number, severity, and/or frequency of symptoms of a disease in a subject.

[0208] In some embodiments, the described MMP7 RNAi agents are optionally combined with one or more additional (i.e., second, third, etc.) therapeutics. A second therapeutic can be another MMP7 RNAi agent (e.g., a MMP7 RNAi agent that targets a different sequence within a MMP7 gene). In some embodiments, a second therapeutic can be an RNAi agent that targets the MMP7 gene. An additional therapeutic can also be a small molecule drug, antibody, antibody fragment, and/or aptamer. The MMP7 RNAi agents, with or without the one or more additional therapeutics, can be combined with one or more excipients to form pharmaceutical compositions.

[0209] The described pharmaceutical compositions that include a MMP7 RNAi agent can be used to treat at least one symptom in a subject having a disease or disorder that would benefit from reduction or inhibition in expression of MMP7 mRNA. In some embodiments, the subject is administered a therapeutically effective amount of one or more pharmaceutical compositions that include a MMP7 RNAi agent thereby treating the symptom. In other embodiments, the subject is administered aprophylactically effective amount of one or more MMP7 RNAi agents, thereby preventing or inhibiting the at least one symptom.

[0210] In some embodiments, one or more of the described MMP7 RNAi agents are administered to a mammal in a pharmaceutically acceptable carrier or diluent. In some embodiments, the mammal is a human.

[0211] The route of administration is the path by which a MMP7 RNAi agent is brought into contact with the body. In general, methods of administering drugs, oligonucleotides, and nucleic acids, for treatment of a mammal are well known in the art and can be applied to administration of the compositions described herein. The MMP7 RNAi agents disclosed herein can be administered via any suitable route in a preparation appropriately tailored to the particular route. Thus, in some embodiments, the herein described pharmaceutical compositions are administered via inhalation, intranasal administration, intratracheal administration, or oropharyngeal aspiration administration. In some embodiments, the pharmaceutical compositions can be administered by injection, for example, intravenously, intramuscularly, intracutaneously, subcutaneously, intraarticularly, intraocularly, or intraperitoneally, or topically.

[0212] The pharmaceutical compositions including a MMP7 RNAi agent described herein can be delivered to a cell, group of cells, tissue, or subject using oligonucleotide delivery technologies known in the art. In general, any suitable method recognized in the art for delivering a nucleic acid molecule (in vitro or in vivo) can be adapted for use with the compositions described herein. For example, delivery can be by local administration, (e.g., direct injection, implantation, or topical administering), systemic administration, or subcutaneous, intravenous, intraperitoneal, or parenteral routes, including intracranial (e.g., intraventricular, intraparenchymal and intrathecal), intramuscular, transdermal, airway (aerosol), nasal, oral, rectal, or topical (including buccal and sublingual) administration. In some embodiments, the compositions are administered via inhalation, intranasal administration, oropharyngeal aspiration administration, or intratracheal administration.

[0213] For example, in some embodiments, it is desired that the MMP7 RNAi agents described herein inhibit the expression of an MMP7 gene in the pulmonary epithelium, for which administration via inhalation (e.g., by an inhaler device, such as a metered-dose inhaler, or a nebulizer such as a jet or vibrating mesh nebulizer, or a soft mist inhaler) is particularly suitable and advantageous

[0214] In some embodiments, the pharmaceutical compositions described herein comprise one or more pharmaceutically acceptable excipients. The pharmaceutical compositions described herein are formulated for administration to a subject.

[0215] As used herein, a pharmaceutical composition includes a pharmacologically effective amount of at least one of the described therapeutic compounds and one or more pharmaceutically acceptable excipients. Pharmaceutically acceptable excipients (excipients) are substances other than the Active Pharmaceutical Ingredient (API, therapeutic product, e.g., MMP7 RNAi agent) that are intentionally included in the drug delivery system. Excipients do not exert or are not intended to exert a therapeutic effect at the intended dosage. Excipients can act to a) aid in processing of the drug delivery system during manufacture, b) protect, support or enhance stability, bioavailability or patient acceptability of the API, c) assist in product identification, and/or d) enhance any other attribute of the overall safety, effectiveness, of delivery of the API during stoMMP7 or use. A pharmaceutically acceptable excipient may or may not be an inert substance.

[0216] Excipients include, but are not limited to: absorption enhancers, anti-adherents, anti-foaming agents, anti-oxidants, binders, buffering agents, carriers, coating agents, colors, delivery enhancers, delivery polymers, detergents, dextran, dextrose, diluents, disintegrants, emulsifiers, extenders, fillers, flavors, glidants, humectants, lubricants, oils, polymers, preservatives, saline, salts, solvents, sugars, surfactants, suspending agents, sustained release matrices, sweeteners, thickening agents, tonicity agents, vehicles, water-repelling agents, and wetting agents.

[0217] Pharmaceutical compositions suitable for injectable use include sterile aqueous solutions (where water-soluble) or dispersions and sterile powders for the extemporaneous preparation of sterile injectable solutions or dispersion. For intravenous administration, suitable carriers include physiological saline, bacteriostatic water, Cremophor® EL™ (BASF, Parsippany, N.J.) or phosphate buffered saline (PBS). It should be stable under the conditions of manufacture and storage and should be preserved against the contaminating action of microorganisms such as bacteria and fungi. The carrier can be a solvent or dispersion medium containing, for example, water, ethanol, polyol (for example, glycerol, propylene glycol, and liquid polyethylene glycol), and suitable mixtures thereof. The proper fluidity can be maintained, for example, by the use of a coating such as lecithin, by the maintenance of the required particle size in the case of dispersion and by the use of surfactants. In many cases, it will be preferable to include isotonic agents, for example, sugars, polyalcohols such as mannitol, sorbitol, and sodium chloride in the composition. Prolonged absorption of the injectable compositions can be brought about by including in the composition an agent which delays absorption, for example, aluminum monostearate and gelatin.

[0218] Sterile injectable solutions can be prepared by incorporating the active compound in the required amount in an appropriate solvent with one or a combination of ingredients enumerated above, as required, followed by filter sterilization. Generally, dispersions are prepared by incorporating the active compound into a sterile vehicle which contains a basic dispersion medium and the required other ingredients from those enumerated above. In the case of sterile powders for the preparation of sterile injectable solutions, methods of preparation include vacuum drying and freeze-drying which yields a powder of the active ingredient plus any additional desired ingredient from a previously sterile-filtered solution thereof.

[0219] Formulations suitable for intra-articular administration can be in the form of a sterile aqueous preparation of the drug that can be in microcrystalline form, for example, in the form of an aqueous microcrystalline suspension. Liposomal formulations or biodegradable polymer systems can also be used to present the drug for both intra-articular and ophthalmic administration.

[0220] Formulations suitable for inhalation administration can be prepared by incorporating the active compound in the desired amount in an appropriate solvent, followed by sterile filtration. In general, formulations for inhalation administration are sterile solutions at physiological pH and have low viscosity (<5 cP). Salts may be added to the formulation to balance tonicity. In some cases, surfactants or co-solvents can be added to increase active compound solubility and improve aerosol characteristics. In some cases, excipients can be added to control viscosity in order to ensure size and distribution of nebulized droplets.

[0221] In some embodiments, pharmaceutical formulations that include the MMP7 RNAi agents disclosed herein suitable for inhalation administration can be prepared in water for injection (sterile water), or an aqueous sodium phosphate buffer (for example, the MMP7 RNAi agent formulated in 0.5 mM sodium phosphate monobasic, 0.5 mM sodium phosphate dibasic, in water).

[0222] The active compounds can be prepared with carriers that will protect the compound against rapid elimination from the body, such as a controlled release formulation, including implants and microencapsulated delivery systems. Biodegradable, biocompatible polymers can be used, such as ethylene vinyl acetate, polyanhydrides, polyglycolic acid, collagen, polyorthoesters, and polylactic acid. Methods for preparation of such formulations will be apparent to those skilled in the art. Liposomal suspensions can also be used as pharmaceutically acceptable carriers. These can be prepared according to methods known to those skilled in the art, for example, as described in U.S. Pat. No. 4,522,811.

[0223] The MMP7 RNAi agents can be formulated in compositions in dosage unit form for ease of administration and uniformity of dosage. Dosage unit form refers to physically discrete units suited as unitary dosages for the subject to be treated; each unit containing a predetermined quantity of active compound calculated to produce the desired therapeutic effect in association with the required pharmaceutical carrier. The specification for the dosage unit forms of the disclosure are dictated by and directly dependent on the unique characteristics of the active compound and the therapeutic effect to be achieved, and the limitations inherent in the art of compounding such an active compound for the treatment of individuals.

[0224] A pharmaceutical composition can contain other additional components commonly found in pharmaceutical compositions. Such additional components include, but are not limited to: anti-pruritics, astringents, local anesthetics, or anti-inflammatory agents (e.g., antihistamine, diphenhydramine, etc.). It is also envisioned that cells, tissues, or isolated organs that express or comprise the herein defined RNAi agents may be used as “pharmaceutical compositions.” As used herein, “pharmacologically effective amount,” “therapeutically effective amount,” or simply “effective amount” refers to that amount of an RNAi agent to produce a pharmacological, therapeutic, or preventive result.

[0225] In some embodiments, the methods disclosed herein further comprise the step of administering a second therapeutic or treatment in addition to administering an RNAi agent disclosed herein. In some embodiments, the second therapeutic is another MMP7 RNAi agent (e.g., a MMP7 RNAi agent that targets a different sequence within the MMP7 target). In other embodiments, the second therapeutic can be a small molecule drug, an antibody, an antibody fragment, and/or an aptamer.

[0226] In some embodiments, described herein are compositions that include a combination or cocktail of at least two MMP7 RNAi agents having different sequences. In some embodiments, the two or more MMP7 RNAi agents are each separately and independently linked to targeting groups. In some embodiments, the two or more MMP7 RNAi agents are each linked to targeting groups that include or consist of integrin targeting ligands. In some embodiments, the two or more MMP7 RNAi agents are each linked to targeting groups that include or consist of αvβ6 integrin targeting ligands.

[0227] Described herein are compositions for delivery of MMP7 RNAi agents to pulmonary epithelial cells. Furthermore, compositions for delivery of MMP7 RNAi agents to cells, including renal epithelial cells and/or epithelial cells in the GI or reproductive tract and/or and ocular surface epithelial cells in the eye, in vivo, are generally described herein.

[0228] Generally, an effective amount of a MMP7 RNAi agent disclosed herein will be in the range of from about 0.0001 to about 20 mg/kg of body weight/deposited dose, e.g., from about 0.001 to about 5 mg/kg of body weight/deposited dose. In some embodiments, an effective amount of a MMP7 RNAi agent will be in the range of from about 0.01 mg/kg to about 3.0 mg/kg of body weight per deposited dose. In some embodiments, an effective amount of a MMP7 RNAi agent will be in the range of from about 0.03 mg/kg to about 2.0 mg/kg of body weight per deposited dose. In some embodiments, an effective amount of a MMP7 RNAi agent will be in the range of from about 0.01 to about 1.0 mg/kg of deposited dose per body weight. In some embodiments, an effective amount of a MMP7 RNAi agent will be in the range of from about 0.50 to about 1.0 mg/kg of deposited dose per body weight. Calculating the pulmonary deposited dose (PDD) is done in accordance with methods known in the art. (See Wolff R. K., Dorato M. A., Toxicologic Testing of Inhaled Pharmaceutical Aerosols, Crit Rev Toxicol., 1993; 23(4):343-369; Tepper et al., International J. Toxicology, 2016, vol. 35(4):376-392). The amount administered will also likely depend on such variables as the overall health status of the patient, the relative biological efficacy of the compound delivered, the formulation of the drug, the presence and types of excipients in the formulation, and the route of administration. Also, it is to be understood that the initial dosage administered can be increased beyond the above upper level to rapidly achieve the desired blood-level or tissue level, or the initial dosage can be smaller than the optimum. In some embodiments, a dose is administered daily. In some embodiments, a dose is administered weekly. In further embodiments, a dose is administered bi-weekly, tri-weekly, once monthly, or once quarterly (i.e., once every three months).

[0229] For treatment of disease or for formation of a medicament or composition for treatment of a disease, the pharmaceutical compositions described herein including a MMP7 RNAi agent can be combined with an excipient or with a second therapeutic agent or treatment including, but not limited to: a second or other RNAi agent, a small molecule drug, an antibody, an antibody fragment, peptide, and/or an aptamer.

[0230] The described MMP7 RNAi agents, when added to pharmaceutically acceptable excipients or adjuvants, can be packaged into kits, containers, packs, or dispensers. The pharmaceutical compositions described herein can be packaged in dry powder or aerosol inhalers, other metered-dose inhalers, nebulizers, pre-filled syringes, or vials.

### Methods of Treatment and Inhibition of MMP7 Expression

[0231] The MMP7 RNAi agents disclosed herein can be used to treat a subject (e.g., a human or other mammal) having a disease or disorder that would benefit from administration of the RNAi agent. In some embodiments, the RNAi agents disclosed herein can be used to treat a subject (e.g., a human) that would benefit from a reduction and/or inhibition in expression of MMP7 mRNA and/or a reduction in MMP7 enzyme levels.

[0232] In some embodiments, the RNAi agents disclosed herein can be used to treat a subject (e.g., a human) having a disease or disorder for which the subject would benefit from reduction in MMP7 enzyme levels, including but not limited to, idiopathic pulmonary fibrosis (IPF), asthma, various other types of fibrosis, chronic inflammation, interstitial lung diseases (ILD), infectious disease (for example, SARS-COV-2), acute lung injury (for example, acute respiratory distress syndrome (ARDS)), pulmonary hypertension, various cancers, nonalcoholic fatty liver disease (NAFLD), nonalcoholic steatohepatitis (NASH), fatty liver disease, biliary atresia, and chronic kidney disease (CKD). In some embodiments the disease is IPF. In some embodiments the subject has been previously diagnosed with having IPF, asthma, ILD, ARDS, or another type of fibrosis. Treatment of a subject can include therapeutic and/or prophylactic treatment. The subject is administered a therapeutically effective amount of any one or more MMP7 RNAi agents described herein. The subject can be a human, patient, or human patient. The subject may be an adult, adolescent, child, or infant. Administration of a pharmaceutical composition described herein can be to a human being or animal.

[0233] Increased membrane MMP7 enzyme levels are known to contribute to aberrant epithelial cell, fibroblast, and immune cell function and have been linked to fibrosis particularly in pulmonary tissues and cells. In some embodiments, the described MMP7 RNAi agents are used to treat at least one symptom mediated at least in part by a reduction in MMP7 enzyme levels, in a subject. The subject is administered a therapeutically effective amount of any one or more of the described MMP7 RNAi agents. In some embodiments, the subject is administered a prophylactically effective amount of any one or more of the described RNAi agents, thereby treating the subject by preventing or inhibiting the at least one symptom.

[0234] In certain embodiments, the present disclosure provides methods for treatment of diseases, disorders, conditions, or pathological states mediated at least in part by MMP7 gene expression, in a patient in need thereof, wherein the methods include administering to the patient any of the MMP7 RNAi agents described herein.

[0235] In some embodiments, the MMP7 RNAi agents are used to treat or manage a clinical presentation or pathological state in a subject, wherein the clinical presentation or pathological state is mediated at least in part by a reduction in MMP7 expression. The subject is administered a therapeutically effective amount of one or more of the MMP7 RNAi agents or MMP7 RNAi agent-containing compositions described herein. In some embodiments, the method comprises administering a composition comprising a MMP7 RNAi agent described herein to a subject to be treated.

[0236] In a further aspect, the disclosure features methods of treatment (including prophylactic or preventative treatment) of diseases or symptoms that may be addressed by a reduction in MMP7 enzyme levels, the methods comprising administering to a subject in need thereof a MMP7 RNAi agent that includes an antisense strand comprising the sequence of any of the sequences in Table 2, Table 3, or Table 10. Also described herein are compositions for use in such methods.

[0237] The described MMP7 RNAi agents and/or compositions that include MMP7 RNAi agents can be used in methods for therapeutic treatment of disease or conditions caused by enhanced or elevated MMP7 enzyme levels. Such methods include administration of a MMP7 RNAi agent as described herein to a subject, e.g., a human or animal subject.

[0238] In another aspect, the disclosure provides methods for the treatment (including prophylactic treatment) of a pathological state (such as a condition or disease) mediated at least in part by MMP7 expression, wherein the methods include administering to a subject a therapeutically effective amount of an RNAi agent that includes an antisense strand comprising the sequence of any of the sequences in Table 2, Table 3, or Table 10.

[0239] In some embodiments, methods for inhibiting expression of an MMP7 gene are disclosed herein, wherein the methods include administering to a cell an RNAi agent that includes an antisense strand comprising the sequence of any of the sequences in Table 2, Table 3, or Table 10.

[0240] In some embodiments, methods for the treatment (including prophylactic treatment) of a pathological state mediated at least in part by MMP7 expression are disclosed herein, wherein the methods include administering to a subject a therapeutically effective amount of an RNAi agent that includes a sense strand comprising the sequence of any of the sequences in Table 2, Table 4, Table 5, Table 6, or Table 10.

[0241] In some embodiments, methods for inhibiting expression of an MMP7 gene are disclosed herein, wherein the methods comprise administering to a cell an RNAi agent that includes a sense strand comprising the sequence of any of the sequences in Table 2, Table 4, Table 5, Table 6, or Table 10.

[0242] In some embodiments, methods for the treatment (including prophylactic treatment) of a pathological state mediated at least in part by MMP7 expression are disclosed herein, wherein the methods include administering to a subject a therapeutically effective amount of an RNAi agent that includes a sense strand comprising the sequence of any of the sequences in Table 4, Table 5. Table 6, or Table 10, and an antisense strand comprising the sequence of any of the sequences in Table 3 or Table 10.

[0243] In some embodiments, methods for inhibiting expression of a MMP7 gene are disclosed herein, wherein the methods include administering to a cell an RNAi agent that includes a sense strand comprising the sequence of any of the sequences in Table 4, Table 5, Table 6, or Table 10, and an antisense strand comprising the sequence of any of the sequences in Table 3 or Table 10.

[0244] In some embodiments, methods of inhibiting expression of a MMP7 gene are disclosed herein, wherein the methods include administering to a subject a MMP7 RNAi agent that includes a sense strand consisting of the nucleobase sequence of any of the sequences in Table 4, Table 5, Table 6, or Table 10, and the antisense strand consisting of the nucleobase sequence of any of the sequences in Table 3 or Table 10. In other embodiments, disclosed herein are methods of inhibiting expression of a MMP7 gene, wherein the methods include administering to a subject a MMP7 RNAi agent that includes a sense strand consisting of the modified sequence ofany of the modified sequences in Table 4, Table 5, Table 6, or Table 10, and the antisense strand consisting of the modified sequence of any of the modified sequences in Table 3 or Table 10.

[0245] In some embodiments, methods for inhibiting expression of an MMP7 gene in a cell are disclosed herein, wherein the methods include administering one or more MMP7 RNAi agents comprising a duplex structure of one of the duplexes set forth in Tables 7A, 7B, 8, 9, and 10.

[0246] In some embodiments, the MMP7 gene expression level and/or MMP7 mRNA level in certain pulmonary epithelial cells of subject to whom a described MMP7 RNAi agent is administered is reduced by at least about 5%, 10%, 15%, 20%, 25%, 30%, 35%, 40%, 45%, 50%, 55%, 60%, 65%, 70%, 75%, 80%, 85%, 90%, 95%, 96%, 97%, 98%, 99%, or greater than 99%, relative to the subject's respective level prior to being administered the MMP7 RNAi agent or to a different subject not receiving the MMP7 RNAi agent. In some embodiments, the MMP7 enzyme levels in certain epithelial cells or circulating MMP7 enzyme levels of a subject to whom a described MMP7 RNAi agent is administered is reduced by at least about 5%, 10%, 15%, 20%, 25%, 30%, 35%, 40%, 45%, 50%, 55%, 60%, 65%, 70%, 75%, 80%, 85%, 90%, 95%, 96%, 97%, 98%, 99%, or greater than 99%, relative to the subject prior to being administered the MMP7 RNAi agent or to a different subject not receiving the MMP7 RNAi agent. The gene expression level, enzyme or protein level, and/or mRNA level in the subject may be reduced in a cell, group of cells, serum, and/or tissue of the subject. In some embodiments, the MMP7 enzyme levels in certain subject to whom a described MMP7 RNAi agent has been administered is reduced by at least about 30%, 35%, 40%, 45%, 50%, 55%, 60%, 65%, 70%, 75%, 80%, 85%, 90%, 95%, or 98% relative to the subject prior to being administered the MMP7 RNAi agent or to a subject not receiving the MMP7 RNAi agent.

[0247] A reduction in gene expression, mRNA, and enzyme or protein levels can be assessed by any methods known in the art. Reduction or decrease in MMP7 enzyme levels or MMP7 mRNA levels are sometimes collectively referred to herein as a decrease in, reduction of, or inhibition of MMP7 gene expression. The Examples set forth herein illustrate known methods for assessing inhibition of MMP7.

### Cells, Tissues, Organs, and Non-Human Organisms

[0248] Cells, tissues, organs, and non-human organisms that include at least one of the MMP7 RNAi agents described herein are contemplated. The cell, tissue, organ, or non-human organism is made by delivering the RNAi agent to the cell, tissue, organ, or non-human organism.

### Additional Illustrative Embodiments

[0249] Provided here are certain additional illustrative embodiments of the disclosed technology. These embodiments are illustrative only and do not limit the scope of the present disclosure or of the claims attached hereto.
[0250] Embodiment 1. An RNAi agent for inhibiting expression of a matrix metallopeptidase 7 gene, comprising:
   [0251] an antisense strand comprising at least 17 contiguous nucleotides differing by 0 or 1 nucleotides from any one of the sequences provided in Table 2 or Table 3; and
   [0252] a sense strand comprising a nucleotide sequence that is at least partially complementary to the antisense strand.
[0253] Embodiment 2. The RNAi agent of embodiment 1, wherein the antisense strand comprises nucleotides 2-18 of any one of the sequences provided in Table 2 or Table 3.
[0254] Embodiment 3. The RNAi agent of embodiment 1 or embodiment 2, wherein the sense strand comprises a nucleotide sequence of at least 17 contiguous nucleotides differing by 0 or 1 nucleotides from any one of the sequences provided in Table 2 or Table 4, and wherein the sense strand has a region of at least 85% complementarity over the 17 contiguous nucleotides to the antisense strand.
[0255] Embodiment 4. The RNAi agent of any one of embodiments 1-3, wherein at least one nucleotide of the MMP7 RNAi agent is a modified nucleotide or includes a modified internucleoside linkage.
[0256] Embodiment 5. The RNAi agent of any one of embodiments 1-4, wherein all or substantially all of the nucleotides are modified nucleotides.
[0257] Embodiment 6. The RNAi agent of any one of embodiments 4-5, wherein the modified nucleotide is selected from the group consisting of: 2′-O-methyl nucleotide, 2′-fluoro nucleotide, 2′-deoxy nucleotide, 2′,3′-seco nucleotide mimic, locked nucleotide, 2′-F-arabino nucleotide, 2′-methoxyethyl nucleotide, abasic nucleotide, ribitol, inverted nucleotide, inverted 2′-O-methyl nucleotide, inverted 2′-deoxy nucleotide, 2′-amino-modified nucleotide, 2′-alkyl-modified nucleotide, morpholino nucleotide, vinyl phosphonate-containing nucleotide, cyclopropyl phosphonate-containing nucleotide, and 3′-O-methyl nucleotide.
[0258] Embodiment 7. The RNAi agent of embodiment 5, wherein all or substantially all of the nucleotides are modified with 2′-O-methyl nucleotides, 2′-fluoro nucleotides, or combinations thereof.
[0259] Embodiment 8. The RNAi agent of any one of embodiments 1-7, wherein the antisense strand comprises the nucleotide sequence of any one of the modified sequences provided in Table 3.
[0260] Embodiment 9. The RNAi agent of any one of embodiments 1-8, wherein the sense strand comprises the nucleotide sequence of any one of the modified sequences provided in Table 4.
[0261] Embodiment 10. The RNAi agent of embodiment 1, wherein the antisense strand comprises the nucleotide sequence of any one of the modified sequences provided in Table 3 and the sense strand comprises the nucleotide sequence of any one of the modified sequences provided in Table 4.
[0262] Embodiment 11. The RNAi agent of any one of embodiments 1-10, wherein the sense strand is between 18 and 30 nucleotides in length, and the antisense strand is between 18 and 30 nucleotides in length.
[0263] Embodiment 12. The RNAi agent of embodiment 11, wherein the sense strand and the antisense strand are each between 18 and 27 nucleotides in length.
[0264] Embodiment 13. The RNAi agent of embodiment 12, wherein the sense strand and the antisense strand are each between 18 and 24 nucleotides in length.
[0265] Embodiment 14. The RNAi agent of embodiment 13, wherein the sense strand and the antisense strand are each 21 nucleotides in length.
[0266] Embodiment 15. The RNAi agent of embodiment 14, wherein the RNAi agent has two blunt ends.
[0267] Embodiment 16. The RNAi agent of any one of embodiments 1-15, wherein the sense strand comprises one or two terminal caps.
[0268] Embodiment 17. The RNAi agent of any one of embodiments 1-16, wherein the sense strand comprises one or two inverted abasic residues.
[0269] Embodiment 18. The RNAi agent of embodiment 1, wherein the RNAi agent is comprised of a sense strand and an antisense strand that form a duplex having the structure of any one of the duplexes in Table 7A, Table 7B, Table 8, Table 9, or Table 10.
[0270] Embodiment 19. The RNAi agent of embodiment 18, wherein all or substantially all of the nucleotides are modified nucleotides.
[0271] Embodiment 20. The RNAi agent of embodiment 1, comprising an antisense strand that consists of, consists essentially of, or comprises a nucleotide sequence that differs by 0 or 1 nucleotides from one of the following nucleotide sequences (5′→3′):

(SEQ ID NO: 175)
AGACAUUCAAAAACCAACU;
(SEQ ID NO: 123)
UUGACACUAAUCGAUCCAC;
(SEQ ID NO: 176)
UGACAUUCAAAAACCAACU;
(SEQ ID NO: 674)
AGACAUUCAAAAACCAACUGC;
(SEQ ID NO: 661)
UUGACACUAAUCGAUCCACUG;
or
(SEQ ID NO: 679)
UGACAUUCAAAAACCAACUGC.

[0272] Embodiment 21. The RNAi agent of embodiment 20, wherein the sense strand consists of, consists essentially of, or comprises a nucleotide sequence that differs by 0 or 1 nucleotides from one of the following nucleotide sequences (5′→3′):

(SEQ ID NO: 325)
AGUUGGUUUUUGAAUGUCU;
(SEQ ID NO: 273)
GUGGAUCGAUUAGUGUCAA;
(SEQ ID NO: 326)
AGUUGGUUUUUGAAUGUCA;
(SEQ ID NO: 720)
GCAGUUGGUUUUUGAAUGUCU;
(SEQ ID NO: 724)
CAGUGGAUCGAUUAGUGUCAA;
or
(SEQ ID NO: 726)
GCAGUUGGUUUUUGAAUGUCA.

[0273] Embodiment 22. The RNAi agent of embodiment 20 or 21, wherein all or substantially all of the nucleotides are modified nucleotides.
[0274] Embodiment 23. The RNAi agent of embodiment 1, comprising an antisense strand that comprises, consists of, or consists essentially of a modified nucleotide sequence that differs by 0 or 1 nucleotides from one of the following nucleotide sequences (5′→3′):

(SEQ ID NO: 396)
asGfsascauucAfaaAfaCfcAfacugsc;
(SEQ ID NO: 393)
usUfsgsacacUfaAfuCfgAfuCfcacusg;
or
(SEQ ID NO: 406)
cPrpuGfacauucAfaaAfaCfcAfacugsc;

wherein a, c, g, and u represent 2′-O-methyl adenosine, 2′-O-methyl cytidine, 2′-O-methyl guanosine, and 2′-O-methyl uridine, respectively; Af, Cf, Gf, and Uf represent 2′-fluoro adenosine, 2′-fluoro cytidine, 2′-fluoro guanosine, and 2′-fluoro uridine, respectively; cPrpu represents a 5′-cyclopropyl phosphonate-2′-O-methyl uridine; s represents a phosphorothioate linkage; and wherein all or substantially all of the nucleotides on the sense strand are modified nucleotides.
[0275] Embodiment 24. The RNAi agent of embodiment 1, wherein the sense strand comprises, consists of, or consists essentially of a modified nucleotide sequence that differs by 0 or 1 nucleotides from one of the following nucleotide sequences (5′→3′):

(SEQ ID NO: 522)
gscaguuggUfuUfuUfgaaugucu;
(SEQ ID NO: 524)
csaguggauCfgAfuUfagugucaa;
(SEQ ID NO: 526)
gscaguuggUfuUfuUfgaauguca;

wherein a, c, g, i, and u represent 2′-O-methyl adenosine, 2′-O-methyl cytidine, 2′-O-methyl guanosine, 2′-O-methyl inosine, and 2′-O-methyl uridine, respectively; Af, Cf, Gf, and Uf represent 2′-fluoro adenosine, 2′-fluoro cytidine, 2′-fluoro guanosine, and 2′-fluoro uridine, respectively; and s represents a phosphorothioate linkage; and wherein all or substantially all of the nucleotides on the antisense strand are modified nucleotides.
[0276] Embodiment 25. The RNAi agent of any one of embodiments 20-24, wherein the sense strand further includes inverted abasic residues at the 3′ terminal end of the nucleotide sequence, at the 5′ end of the nucleotide sequence, or at both.
[0277] Embodiment 26. The RNAi agent of any one of embodiments 1-25, wherein the RNAi agent is linked to a targeting ligand.
[0278] Embodiment 27. The RNAi agent of embodiment 26, wherein the targeting ligand has affinity for a cell receptor expressed on an epithelial cell.
[0279] Embodiment 28. The RNAi agent of embodiment 27, wherein the targeting ligand comprises an integrin targeting ligand.
[0280] Embodiment 29. The RNAi agent of embodiment 28, wherein the integrin targeting ligand is an αvβ6 integrin targeting ligand.
[0281] Embodiment 30. The RNAi agent of embodiment 29, wherein the targeting ligand comprises the structure:

[chemical structure]

or a pharmaceutically acceptable salt thereof,

[chemical structure]

or a pharmaceutically acceptable salt thereof,
[0282] wherein [symbol] indicates the point of connection to the RNAi agent.
[0283] Embodiment 31. The RNAi agent of any one of embodiments 26-29, wherein the targeting ligand has a structure selected from the group consisting of:

[chemical structure]

[chemical structure]

[chemical structure]

[chemical structure]

[chemical structure]

[chemical structure]

[chemical structure]

[chemical structure]

[chemical structure]

wherein [symbol] indicates the point of connection to the RNAi agent.
[0284] Embodiment 32. The RNAi agent of embodiment 31, wherein RNAi agent is conjugated to a targeting ligand having the following structure:

[chemical structure]

[0285] Embodiment 33. The RNAi agent of any one of embodiments 26-29, wherein the targeting ligand has the following structure:

[chemical structure]

[0286] Embodiment 34. The RNAi agent of any one of embodiments 26-33, wherein the targeting ligand is conjugated to the sense strand.
[0287] Embodiment 35. The RNAi agent of embodiment 34, wherein the targeting ligand is conjugated to the 5′ terminal end of the sense strand.
[0288] Embodiment 36. A composition comprising the RNAi agent of any one of embodiments 1-35, wherein the composition further comprises a pharmaceutically acceptable excipient.
[0289] Embodiment 37. The composition of embodiment 36, further comprising a second RNAi agent capable of inhibiting the expression of matrix metallopeptidase 7 gene expression.
[0290] Embodiment 38. The composition of any one of embodiments 36-37, further comprising one or more additional therapeutics.
[0291] Embodiment 39. The composition of any one of embodiments 36-38, wherein the composition is formulated for administration by inhalation.
[0292] Embodiment 40. The composition of embodiment 39, wherein the composition is delivered by a metered-dose inhaler, jet nebulizer, vibrating mesh nebulizer, or soft mist inhaler.
[0293] Embodiment 41. The composition of any of embodiments 36-40, wherein the RNAi agent is a sodium salt.
[0294] Embodiment 42. The composition of any of embodiments 36-41, wherein the pharmaceutically acceptable excipient is water for injection.
[0295] Embodiment 43. The composition of any of embodiments 36-41, wherein the pharmaceutically acceptable excipient is a buffered saline solution.
[0296] Embodiment 44. A method for inhibiting expression of a MMP7 gene in a cell, the method comprising introducing into a cell an effective amount of an RNAi agent of any one of embodiments 1-33 or the composition of any one of embodiments 36-43.
[0297] Embodiment 45. The method of embodiment 44, wherein the cell is within a subject.
[0298] Embodiment 46. The method of embodiment 45, wherein the subject is a human subject.
[0299] Embodiment 47. The method of any one of embodiments 44-46, wherein following the administration of the RNAi agent the matrix metallopeptidase 7 gene expression is inhibited by at least about 30%.
[0300] Embodiment 48. A method of treating one or more symptoms or diseases associated with enhanced or elevated membrane MMP7 activity levels, the method comprising administering to a human subject in need thereof a therapeutically effective amount of the composition of any one of embodiments 36-43.
[0301] Embodiment 49. The method of embodiment 48, wherein the disease is a respiratory or pulmonary disease.
[0302] Embodiment 50. The method of embodiment 48, wherein the disease is selected from the group consisting of: idiopathic pulmonary fibrosis (IPF), another type of pulmonary fibrosis, asthma, chronic inflammation, interstitial lung diseases (ILD), SARS-COV-2 or another type of infectious disease in the airway, acute respiratory distress syndrome (ARDS) or another type of acute lung injury, pulmonary hypertension, lung cancer, nonalcoholic fatty liver disease (NAFLD), nonalcoholic steatohepatitis (NASH), fatty liver disease, biliary atresia, and chronic kidney disease (CKD).
[0303] Embodiment 51. The method of embodiment 50, wherein the disease is idiopathic pulmonary fibrosis (IPF).
[0304] Embodiment 54. The method of any one of embodiments 44-51, wherein the RNAi agent is administered at a deposited dose of about 0.01 mg/kg to about 5.0 mg/kg of body weight of the subject.
[0305] Embodiment 55. The method of any one of embodiments 44-54, wherein the RNAi agent is administered at a deposited dose of about 0.03 mg/kg to about 2.0 mg/kg of body weight of the subject.
[0306] Embodiment 56. The method of any one of embodiments 44-55, wherein the RNAi agent is administered in two or more doses.
[0307] Embodiment 57. Use of the RNAi agent of any one of embodiments 1-35, for the treatment of a disease, disorder, or symptom that is mediated at least in part by membrane MMP7 activity and/or MMP7 gene expression.
[0308] Embodiment 58. Use of the composition according to any one of embodiments 36-43, for the treatment of a disease, disorder, or symptom that is mediated at least in part by matrix metallopeptidase 7 activity and/or matrix metallopeptidase 7 gene expression.
[0309] Embodiment 59. Use of the composition according to any one of embodiments 36-43, for the manufacture of a medicament for treatment of a disease, disorder, or symptom that is mediated at least in part by matrix metallopeptidase 7 and/or matrix metallopeptidase 7 gene expression.
[0310] Embodiment 60. The use of any one of embodiments 57-59, wherein the disease is pulmonary inflammation.
[0311] Embodiment 61. A method of making an RNAi agent of any one of embodiments 1-35, comprising annealing a sense strand and an antisense strand to form a double-stranded ribonucleic acid molecule.
[0312] Embodiment 62. The method of embodiment 61, wherein the sense strand comprises a targeting ligand.
[0313] Embodiment 63. The method of embodiment 62, comprising conjugating a targeting ligand to the sense strand.
[0314] The above provided embodiments and items are now illustrated with the following, non-limiting examples.

### EXAMPLES

### Example 1. Synthesis of MMP7 RNAi Agents

[0315] MMP7 RNAi agent duplexes disclosed herein were synthesized in accordance with the following:

### A. Synthesis

[0316] The sense and antisense strands of the MMP7 RNAi agents were synthesized according to phosphoramidite technology on solid phase used in oligonucleotide synthesis. Depending on the scale, a MerMade96E® (Bioautomation), a MerMade12® (Bioautomation), or an OP Pilot 100 (GE Healthcare) was used. Syntheses were performed on a solid support made of controlled pore glass (CPG, 500 Å or 600 Å, obtained from Prime Synthesis, Aston, Pa., USA). All RNA and 2′-modified RNA phosphoramidites were purchased from Thermo Fisher Scientific (Milwaukee, Wis., USA). Specifically, the 2′-O-methyl phosphoramidites that were used included the following: (5′-O-dimethoxytrityl-N⁶-(benzoyl)-2′-O-methyl-adenosine-3′-O-(2-cyanoethyl-N,N-diisopropylamino) phosphoramidite, 5′-O-dimethoxy-trityl-N⁴-(acetyl)-2′-O-methyl-cytidine-3′-O-(2-cyanoethyl-N,N-diisopropyl-amino) phosphoramidite, (5′-O-dimethoxytrityl-N²-(isobutyryl)-2′-O-methyl-guanosine-3′-O-(2-cyanoethyl-N,N-diisopropylamino) phosphoramidite, and 5′-O-dimethoxytrityl-2′-O-methyl-uridine-3′-O-(2-cyanoethyl-N,N-diisopropylamino) phosphoramidite. The 2′-deoxy-2′-fluoro-phosphoramidites carried the same protecting groups as the 2′-O-methyl RNA amidites. 5′-dimethoxytrityl-2′-O-methyl-inosine-3′-O-(2-cyanoethyl-N,N-diisopropylamino) phosphoramidites were purchased from Glen Research (Virginia). The inverted abasic (3′-O-dimethoxytrityl-2′-deoxyribose-5′-O-(2-cyanoethyl-N,N-diisopropylamino) phosphoramidites were purchased from ChemGenes (Wilmington, Mass., USA). The following UNA phosphoramidites were used: 5′-(4,4′-Dimethoxytrityl)-N6-(benzoyl)-2′,3′-seco-adenosine, 2′-benzoyl-3′-[(2-cyanoethyl)-(N,N-diisopropyl)]-phosphoramidite, 5′-(4,4′-Dimethoxytrityl)-N-acetyl-2′,3′-seco-cytosine, 2′-benzoyl-3′-[(2-cyanoethyl)-(N,N-diiso-propyl)]-phosphoramidite, 5′-(4,4′-Dimethoxytrityl)-N-isobutyryl-2′,3′-seco-guanosine, 2′-benzoyl-3′-[(2-cyanoethyl)-(N,N-diisopropyl)]-phosphoramidite, and 5′-(4,4′-Dimethoxy-trityl)-2′,3′-seco-uridine, 2′-benzoyl-3′-[(2-cyanoethyl)-(N,N-diiso-propyl)]-phosphoramidite. TFA aminolink phosphoramidites were also commercially purchased (ThermoFisher). Linker L6 was purchased as propargyl-PEG5-NHS from BroadPharm (catalog #BP-20907) and coupled to the NH₂-C₆ group from an aminolink phosphoramidite to form -L6-C6-, using standard coupling conditions. The linker Alk-cyHex was similarly commercially purchased from Lumiprobe (alkyne phosphoramidite, 5′-terminal) as a propargyl-containing compound phosphoramidite compound to form the linker -Alk-cyHex-. In each case, phosphorothioate linkages were introduced as specified using the conditions set forth herein. The cyclopropyl phosphonate phosphoramidites were synthesized in accordance with International Patent Application Publication No. WO 2017/214112 (see also Altenhofer et. al., Chem. Communications (Royal Soc. Chem.), 57(55):6808-6811 (July 2021)).

[0317] Tri-alkyne-containing phosphoramidites were dissolved in anhydrous dichloromethane or anhydrous acetonitrile (50 mM), while all other amidites were dissolved in anhydrous acetonitrile (50 mM) and molecular sieves (3 Å) were added. 5-Benzylthio-1H-tetrazole (BTT, 250 mM in acetonitrile) or 5-Ethylthio-1H-tetrazole (ETT, 250 mM in acetonitrile) was used as activator solution. Coupling times were 10 minutes (RNA), 90 seconds (2′ O-Me), and 60 seconds (2′ F). In order to introduce phosphorothioate linkages, a 100 mM solution of 3-phenyl 1,2,4-dithiazoline-5-one (POS, obtained from PolyOrg, Inc., Leominster, Mass., USA) in anhydrous acetonitrile was employed.

[0318] Alternatively, tri-alkyne moieties were introduced post-synthetically (see section E, below). For this route, the sense strand was functionalized with a 5′ and/or 3′ terminal nucleotide containing a primary amine. TFA aminolink phosphoramidite was dissolved in anhydrous acetonitrile (50 mM) and molecular sieves (3 Å) were added. 5-Benzylthio-1H-tetrazole (BTT, 250 mM in acetonitrile) or 5-Ethylthio-1H-tetrazole (ETT, 250 mM in acetonitrile) was used as activator solution. Coupling times were 10 minutes (RNA), 90 seconds (2′ O-Me), and 60 seconds (2′ F). In order to introduce phosphorothioate linkages, a 100 mM solution of 3-phenyl 1,2,4-dithiazoline-5-one (POS, obtained from PolyOrg, Inc., Leominster, Mass., USA) in anhydrous acetonitrile was employed.

### B. Cleavage and Deprotection of Support Bound Oligomer

[0319] After finalization of the solid phase synthesis, the dried solid support was treated with a 1:1 volume solution of 40 wt. % methylamine in water and 28% to 31% ammonium hydroxide solution (Aldrich) for 1.5 hours at 30° C. The solution was evaporated and the solid residue was reconstituted in water (see below).

### C. Purification

[0320] Crude oligomers were purified by anionic exchange HPLC using a TSKgel SuperQ-5PW 13 μm column and Shimadzu LC-8 system. Buffer A was 20 mM Tris, 5 mM EDTA, pH 9.0 and contained 20% Acetonitrile and buffer B was the same as buffer A with the addition of 1.5 M sodium chloride. UV traces at 260 nm were recorded. Appropriate fractions were pooled then run on size exclusion HPLC using a GE Healthcare XK 16/40 column packed with Sephadex G-25 fine with a running buffer of 100 mM ammonium bicarbonate, pH 6.7 and 20% Acetonitrile or filtered water. Alternatively, pooled fractions were desalted and exchanged into an appropriate buffer or solvent system via tangential flow filtration.

### D. Annealing

[0321] Complementary strands were mixed by combining equimolar RNA solutions (sense and antisense) in 1×PBS (Phosphate-Buffered Saline, 1×, Corning, Cellgro) to form the RNAi agents. Some RNAi agents were lyophilized and stored at −15 to −25° C. Duplex concentration was determined by measuring the solution absorbance on a UV-Vis spectrometer in 1×PBS. The solution absorbance at 260 nm was then multiplied by a conversion factor (0.050 mg/(mL-cm)) and the dilution factor to determine the duplex concentration.

### E. Conjugation of Tri-Alkyne Linker

[0322] In some embodiments a tri-alkyne linker is conjugated to the sense strand of the RNAi agent on resin as a phosphoramidite (see Example 1G for the synthesis of an example tri-alkyne linker phosphoramidite and Example 1A for the conjugation of the phosphoramidite.). In other embodiments, a tri-alkyne linker may be conjugated to the sense strand following cleavage from the resin, described as follows: either prior to or after annealing, in some embodiments, the 5′ or 3′ amine functionalized sense strand is conjugated to a tri-alkyne linker. An example tri-alkyne linker structure that can be used in forming the constructs disclosed herein is as follows:

[chemical structure]

To conjugate the tri-alkyne linker to the annealed duplex, amine-functionalized duplex was dissolved in 90% DMSO/10% H₂O, at ˜50-70 mg/mL. 40 equivalents triethylamine was added, followed by 3 equivalents tri-alkyne-PNP. Once complete, the conjugate was precipitated twice in a solvent system of 1× phosphate buffered saline/acetonitrile (1:14 ratio), and dried.

### F. Synthesis of Targeting Ligand SM6.1

### ((S)-3-(4-(4-((14-azido-3,6,9,12-tetraoxatetradecyl)oxy)naphthalen-1-yl)phenyl)-3-(2-(4-((4-methylpyridin-2-yl)amino)butanamido)acetamido)propanoic acid)

[chemical structure]

[0324] Compound 5 (tert-Butyl(4-methylpyridin-2-yl)carbamate) (0.501 g, 2.406 mmol, 1 equiv.) was dissolved in DMF (17 mL). To the mixture was added NaH (0.116 mg, 3.01 mmol, 1.25 eq, 60% dispersion in oil) The mixture stirred for 10 min before adding Compound 20 (Ethyl 4-Bromobutyrate (0.745 g, 3.82 mmol, 0.547 mL)) (Sigma 167118). After 3 hours the reaction was quenched with ethanol (18 mL) and concentrated. The concentrate was dissolved in DCM (50 mL) and washed with saturated aq. NaCl solution (1×50 mL), dried over Na₂SO₄, filtered and concentrated. The product was purified on silica column, gradient 0-5% Methanol in DCM.

[chemical structure]

[0325] Compound 21 was dissolved (0.80 g, 2.378 mmol) in 100 mL of Acetone:0.1 M NaOH [1:1]. The reaction was monitored by TLC (5% ethyl acetate in hexane). The organics were concentrated away, and the residue was acidified to pH 3-4 with 0.3 M Citric Acid (40 mL). The product was extracted with DCM (3×75 mL). The organics were pooled, dried over Na₂SO₄, filtered and concentrated. The product was used without further purification.

[chemical structure]

[0326] To a solution of Compound 22 (1.1 g, 3.95 mmol, 1 equiv.), Compound 45 (595 mg, 4.74 mmol, 1.2 equiv.), and TBTU (1.52 g, 4.74 mmol, 1.2 equiv.) in anhydrous DMF (10 mL) was added diisopropylethylamine (2.06 mL, 11.85 mmol, 3 equiv.) at 0° C. The reaction mixture was warmed to room temperature and stirred 3 hours. The reaction was quenched by saturated NaHCO₃ solution (10 mL). The aqueous phase was extracted with ethyl acetate (3×10 mL) and the organic phase was combined, dried over anhydrous Na₂SO₄, and concentrated. The product was separated by CombiFlash® using silica gel as the stationary phase. LC-MS: calculated [M+H]+ 366.20, found 367.

[chemical structure]

[0327] To a solution of compound 61 (2 g, 8.96 mmol, 1 equiv.), and compound 62 (2.13 mL, 17.93 mmol, 2 equiv.) in anhydrous DMF (10 mL) was added K₂CO₃ (2.48 g, 17.93 mmol, 2 equiv.) at 0° C. The reaction mixture was warmed to room temperature and stirred overnight. The reaction was quenched by water (10 mL). The aqueous phase was extracted with ethyl acetate (3×10 mL) and the organic phase was combined, dried over anhydrous Na₂SO₄, and concentrated. The product was separated by CombiFlash® using silica gel as the stationary phase.

[chemical structure]

[0328] To a solution of compound 60 (1.77 g, 4.84 mmol, 1 equiv.) in THF (5 mL) and H₂O (5 mL) was added lithium hydroxide monohydrate (0.61 g, 14.53 mmol, 3 equiv.) portion-wise at 0° C. The reaction mixture was warmed to room temperature. After stirring at room temperature for 3 hours, the reaction mixture was acidified by HCl (6 N) to pH 3.0. The aqueous phase was extracted with ethyl acetate (3×20 mL) and the organic layer was combined, dried over Na₂SO₄, and concentrated. LC-MS: calculated [M+H]+ 352.18, found 352.

[chemical structure]

[0329] To a solution of compound 63 (1.88 g, 6.0 mmol, 1.0 equiv.) in anhydrous THF (20 mL) was added n-BuLi in hexane (3.6 mL, 9.0 mmol, 1.5 equiv.) drop-wise at −78° C. The reaction was kept at −78° C. for another 1 hour. Triisopropylborate (2.08 mL, 9.0 mmol, 1.5 equiv.) was then added into the mixture at −78° C. The reaction was then warmed up to room temperature and stirred for another 1 hour. The reaction was quenched by saturated NH₄Cl solution (20 mL) and the pH was adjusted to 3. The aqueous phase was extracted with EtOAc (3×20 mL) and the organic phase was combined, dried over Na₂SO₄, and concentrated.

[chemical structure]

[0330] Compound 12 (300 mg, 0.837 mmol, 1.0 equiv.), Compound 65 (349 mg, 1.256 mmol, 1.5 equiv.), XPhos Pd G2 (13 mg, 0.0167 mmol, 0.02 equiv.), and K₃PO₄ (355 mg, 1.675 mmol, 2.0 equiv.) were mixed in a round-bottom flask. The flask was sealed with a screw-cap septum, and then evacuated and backfilled with nitrogen (this process was repeated a total of 3 times). Then, THF (8 mL) and water (2 mL) were added via syringe. The mixture was bubbled with nitrogen for 20 min and the reaction was kept at room temperature for overnight. The reaction was quenched with water (10 mL), and the aqueous phase was extracted with ethyl acetate (3×10 mL). The organic phase was dried over Na₂SO₄, concentrated, and purified via CombiFlash® using silica gel as the stationary phase and was eluted with 15% EtOAc in hexane. LC-MS: calculated [M+H]+ 512.24, found 512.56.

[chemical structure]

[0331] Compound 66 (858 mg, 1.677 mmol, 1.0 equiv.) was cooled by ice bath. HCl in dioxane (8.4 mL, 33.54 mmol, 20 equiv.) was added into the flask. The reaction was warmed to room temperature and stirred for another 1 hr. The solvent was removed by rotary evaporator and the product was directly used without further purification. LC-MS: calculated [M+H]+ 412.18, found 412.46.

[chemical structure]

[0332] To a solution of compound 64 (500 mg, 1.423 mmol, 1 equiv.), compound 67 (669 mg, 1.494 mmol, 1.05 equiv.), and TBTU (548 mg, 0.492 mmol, 1.2 equiv.) in anhydrous DMF (15 mL) was added diisopropylethylamine (0.744 mL, 4.268 mmol, 3 equiv.) at 0° C. The reaction mixture was warmed to room temperature and stirred for another 1 hr. The reaction was quenched by saturated NaHCO₃ aqueous solution (10 mL) and the product was extracted with ethyl acetate (3×20 mL). The organic phase was combined, dried over Na₂SO₄, and concentrated. The product was purified by CombiFlash® using silica gel as the stationary phase and was eluted with 3-4% methanol in DCM. The yield was 96.23%. LC-MS: calculated [M+H]+ 745.35, found 746.08.

[chemical structure]

[0333] To a solution of compound 68 (1.02 g, 1.369 mmol, 1 equiv.) in ethyl acetate (10 mL) was added 10% Pd/C (0.15 g, 50% H₂O) at room temperature. The reaction mixture was warmed to room temperature and the reaction was monitored by LC-MS. The reaction was kept at room temperature overnight. The solids were filtered through Celite® and the solvent was removed by rotary evaporator. The product was directly used without further purification. LC-MS: [M+H]+ 655.31, found 655.87.

[chemical structure]

[0334] To a solution of compound 69 (100 mg, 0.152 mmol, 1 equiv.) and azido-PEG5-OTs (128 mg, 0.305 mmol, 2 equiv.) in anhydrous DMF (2 mL) was added K₂CO₃ (42 mg, 0.305 mmol, 2 equiv.) at 0° C. The reaction mixture was stirred for 6 hours at 80° C. The reaction was quenched by saturated NaHCO₃ solution and the aqueous layer was extracted with ethyl acetate (3×10 mL). The organic phase was combined, dried over Na₂SO₄, and concentrated. LC-MS: calculated [M+H]+ 900.40, found 901.46.

[chemical structure]

[0335] To a solution of compound 72 (59 mg, 0.0656 mmol, 1.0 equiv.) in THF (2 mL) and water (2 mL) was added lithium hydroxide (5 mg, 0.197 mmol, 3.0 equiv.) at room temperature. The mixture was stirred at room temperature for another 1 hr. The pH was adjusted to 3.0 by HCl (6N) and the aqueous phase was extracted with EtOAc (3×10 mL). The organic phase was combined, dried over Na₂SO₄, and concentrated. TFA (0.5 mL) and DCM (0.5 mL) was added into the residue and the mixture was stirred at room temperature for another 3 hr. The solvent was removed by rotary evaporator. LC-MS: calculated [M+H]+ 786.37, found 786.95.

### G. Synthesis of TriAlk 14

[0336] TriAlk14 and (TriAlk14)s as shown in Table 11, above, may be synthesized using the synthetic route shown below. Compound 14 may be added to the sense strand as a phosphoramidite using standard oligonucleotide synthesis techniques, or compound 22 may be conjugated to the sense strand comprising an amine in an amide coupling reaction.

[chemical structure]

[0337] To a 3-L jacketed reactor was added 500 mL DCM and 4 (75.0 g, 0.16 mol). The internal temperature of the reaction was cooled to 0° C. and TBTU (170.0 g, 0.53 mol) was added. The suspension was then treated with the amine 5 (75.5 g, 0.53 mol) dropwise keeping the internal temperature less than 5° C. The reaction was then treated with DIPEA (72.3 g, 0.56 mol) slowly, keeping the internal temperature less than 5° C. After the addition was complete, the reaction was warmed up to 23° C. over 1 hour, and allowed to stir for 3 hours. A 10% kicker charge of all three reagents were added and allowed to stir an additional 3 hours. The reaction was deemed complete when <1% of 4 remained. The reaction mixture was washed with saturated ammonium chloride solution (2×500 mL) and once with saturated sodium bicarbonate solution (500 mL). The organic layer was then dried over sodium sulfate and concentrated to an oil. The mass of the crude oil was 188 g which contained 72% 6 by QNMR. The crude oil was carried to the next step. Calculated mass for C₄₆H₆₀N₄O₁₁=845.0 m/z. Found [M+H]=846.0.

[chemical structure]

[0338] The 121.2 g of crude oil containing 72 wt % compound 6 (86.0 g, 0.10 mol) was dissolved in DMF (344 mL) and treated with TEA (86 mL, 20 v/v %), keeping the internal temperature below 23° C. The formation of dibenzofulvene (DBF) relative to the consumption of Fmoc-amine 6 was monitored via HPLC method 1 (FIG. 2) and the reaction was complete within 10 hours. To the solution was added glutaric anhydride (12.8 g, 0.11 mol) and the intermediate amine 7 was converted to compound 8 within 2 hours. Upon completion, the DMF and TEA were removed at 30° C. under reduced pressure resulting in 100 g of a crude oil. Due to the high solubility of compound 7 in water, an aqueous workup could not be used, and chromatography is the only way to remove DBF, TMU, and glutaric anhydride. The crude oil (75 g) was purified on a Teledyne ISCO Combi-Flash® purification system in three portions. The crude oil (25 g) was loaded onto a 330 g silica column and eluted from 0-20% methanol/DCM over 30 minutes resulting in 42 g of compound 8 (54% yield over 3 steps). Calculated mass for C₃₆H₅₅N₄O₁₂=736.4 m/z. Found [M+H]=737.0.

[chemical structure]

[0339] Compound 8 (42.0 g, 0.057 mol) was co-stripped with 10 volumes of acetonitrile prior to use to remove any residual methanol from chromatography solvents. The oil was redissolved in DMF (210 mL) and cooled to 0° C. The solution was treated with 4-nitrophenol (8.7 g, 0.063 moL) followed by EDC-hydrochloride (12.0 g, 0.063 mol) and found to reach completion within 10 hours. The solution was cooled to 0° C. and 10 volumes ethyl acetate was added followed by 10 volumes saturated ammonium chloride solution, keeping the internal temperature below 15° C. The layers were allowed to separate and the ethyl acetate layer was washed with brine. The combined aqueous layers were extracted twice with 5 volumes ethyl acetate. The combined organic layers were dried over sodium sulfate and concentrated to an oil. The crude oil (55 g) was purified on a Teledyne ISCO Combi-Flash® purification system in three portions. The crude oil (25 g) was loaded onto a 330 g silica column and eluted from 0-10% methanol/DCM over 30 minutes resulting in 22 g of pure 9 (Compound 22) (50% yield). Calculated mass for C₄₂H₅₉N₅O₁₄=857.4 m/z. Found [M+H]=858.0.

[chemical structure]

[0340] A solution of ester 9 (49.0 g, 57.1 mmol) and 6-amino-1-hexanol (7.36 g, 6.28 mmol) in dichloromethane (3 volumes) was treated with triethylamine (11.56 g, 111.4 mmol) dropwise. The reaction was monitored by observing the disappearance of compound 9 on HPLC Method 1 and was found to be complete in 10 minutes. The crude reaction mixture was diluted with 5 volumes dichloromethane and washed with saturated ammonium chloride (5 volumes) and brine (5 volumes). The organic layer was dried over sodium sulfate and concentrated to an oil. The crude oil was purified on a Teledyne ISCO Combi-Flash® purification system using a 330 g silica column. The 4-nitrophenol was eluted with 100% ethyl acetate and 10 was flushed from the column using 20% methanol/DCM resulting in a colorless oil (39 g, 81% yield). Calculated mass for C₄₂H₆₉N₅O₁₂=836.0 m/z. Found [M+H]=837.0.

[chemical structure]

[0341] Alcohol 10 was co-stripped twice with 10 volumes of acetonitrile to remove any residual methanol from chromatography solvents and once more with dry dichloromethane (KF<60 ppm) to remove trace water. The alcohol 10 (2.30 g, 2.8 mmol) was dissolved in 5 volumes dry dichloromethane (KF<50 ppm) and treated with diisopropylammonium tetrazolide (188 mg, 1.1 mmol). The solution was cooled to 0° C. and treated with 2-cyanoethyl N,N,N′,N′-tetraisopropylphosphoramidite (1.00 g, 3.3 mmol) dropwise. The solution was removed from ice-bath and stirred at 20° C. The reaction was found to be complete within 3-6 hours. The reaction mixture was cooled to 0° C. and treated with 10 volumes of a 1:1 solution of saturated ammonium bicarbonate/brine and then warmed to ambient over 1 minute and allowed to stir an additional 3 minutes at 20° C. The biphasic mixture was transferred to a separatory funnel and 10 volumes of dichloromethane was added. The organic layer was separated and washed with 10 volumes of saturated sodium bicarbonate solution to hydrolyze unreacted bis-phosphorous reagent. The organic layer was dried over sodium sulfate and concentrated to an oil resulting in 3.08 g of 94 wt % Compound 14. Calculated mass for C₅₁H₈₆N₇O₁₃P=1035.6 m/z. Found [M+H]=1036.

### H. Conjugation of Targeting Ligands

[0342] Either prior to or after annealing, the 5′ or 3′ tridentate alkyne functionalized sense strand is conjugated to targeting ligands. The following example describes the conjugation of targeting ligands to the annealed duplex: Stock solutions of 0.5M Tris(3-hydroxypropyltriazolylmethyl)amine (THPTA), 0.5M of Cu(II) sulfate pentahydrate (Cu(II)SO₄·5H₂O) and 2M solution of sodium ascorbate were prepared in deionized water. A 75 mg/mL solution in DMSO of targeting ligand was made. In a 1.5 mL centrifuge tube containing tri-alkyne functionalized duplex (3 mg, 75 μL, 40 mg/mL in deionized water, ˜15,000 g/mol), 25 μL of 1M Hepes pH 8.5 buffer is added. After vortexing, 35 μL of DMSO was added and the solution is vortexed. Targeting ligand was added to the reaction (6 equivalents/duplex, 2 equivalents/alkyne, ˜15 μL) and the solution is vortexed. Using pH paper, pH was checked and confirmed to be pH ˜8. In a separate 1.5 mL centrifuge tube, 50 μL of 0.5M THPTA was mixed with 10 uL of 0.5M Cu(II)SO₄·5H₂O, vortexed, and incubated at room temp for 5 min. After 5 min, THPTA/Cu solution (7.2 μL, 6 equivalents 5:1 THPTA:Cu) was added to the reaction vial, and vortexed. Immediately afterwards, 2M ascorbate (5 μL, 50 equivalents per duplex, 16.7 per alkyne) was added to the reaction vial and vortexed. Once the reaction was complete (typically complete in 0.5-1 h), the reaction was immediately purified by non-denaturing anion exchange chromatography.

### Example 2. MMP7-SEAP Mouse Model

[0343] To assess the potency of the RNAi agents, an MMP7-SEAP mouse model was used. Six to eight week old female C57BL/6 albino mice were transiently transfected in vivo with plasmid by hydrodynamic tail vein injection, administered at least 15 days prior to administration of an MMP7 RNAi agent or control. The plasmid contains the MMP7 cDNA sequence (GenBank NM_002423.5 (SEQ ID NO:1)) inserted into the 3′ UTR of the SEAP (secreted human placental alkaline phosphatase) reporter gene. 50 μg of the plasmid containing the MMP7 cDNA sequence in Ringer's Solution in a total volume of 10% of the animal's body weight was injected into mice via the tail vein to create MMP7-SEAP model mice. The solution was injected through a 27-gauge needle in 5-7 seconds as previously described (Zhang G et al., “High levels of foreign gene expression in hepatocytes after tail vein injection of naked plasmid DNA.” Human Gene Therapy 1999 Vol. 10, p 1735-1737.). Inhibition of expression of MMP7 by an MMP7 RNAi agent results in concomitant inhibition of SEAP expression, which is measured by the Phospha-Light™ SEAP Reporter Gene Assay System (Invitrogen). Prior to treatment, SEAP expression levels in serum were measured and the mice were grouped according to average SEAP levels.

Analyses: SEAP levels may be measured at various times, both before and after administration of MMP7 RNAi agents.

[0344] i) Serum collection: Mice were anesthetized with 2-3% isoflurane and blood samples were collected from the submandibular area into serum separation tubes (Sarstedt AG & Co., Numbrecht, Germany). Blood was allowed to coagulate at ambient temperature for 20 min. The tubes were centrifuged at 8,000×g for 3 min to separate the serum and stored at 4° C.

[0345] ii) Serum SEAP levels: Serum was collected and measured by the Phospha-Light™ SEAP Reporter Gene Assay System (Invitrogen) according to the manufacturer's instructions. Serum SEAP levels for each animal was normalized to the control group of mice injected with saline in order to account for the non-treatment related decline in MMP7 expression with this model. First, the SEAP level for each animal at a time point was divided by the pre-treatment level of expression in that animal (“pre-treatment”) in order to determine the ratio of expression “normalized to pre-treatment”. Expression at a specific time point was then normalized to the control group by dividing the “normalized to pre-treatment” ratio for an individual animal by the average “normalized to pre-treatment” ratio of all mice in the normal saline control group. Alternatively, in some Examples set forth herein, the serum SEAP levels for each animal were assessed by normalizing to pre-treatment levels only.

### Example 3. In Vivo Testing of MMP7 RNAi Agents in MMP7-SEAP Mice

[0346] The MMP7-SEAP mouse model described in Example 2, above, was used. At day 1, each mouse was given a single subcutaneous injection of 200 μl per 20 g body weight containing either 3.0 mg/kg (mpk) of an MMP7 RNAi agent or saline without an MMP7 RNAi agent to be used as a control, according to the following Table 12.

TABLE 12
MMP7 RNAi Agent and Dosing for Example 3

| Group ID | Dosing Regimen |
|---|---|
| Group 1 (isotonic saline) | Single injection on day 1 |
| Group 2 3.0 mg/kg AD08797 | Single injection on day 1 |
| Group 3 3.0 mg/kg AD08798 | Single injection on day 1 |
| Group 4 3.0 mg/kg AD08801 | Single injection on day 1 |
| Group 5 3.0 mg/kg AD08802 | Single injection on day 1 |
| Group 6 3.0 mg/kg AD08803 | Single injection on day 1 |
| Group 7 3.0 mg/kg AD08804 | Single injection on day 1 |
| Group 8 3.0 mg/kg AD08805 | Single injection on day 1 |
| Group 9 3.0 mg/kg AD08815 | Single injection on day 1 |
| Group 10 3.0 mg/kg AD08816 | Single injection on day 1 |
| Group 11 3.0 mg/kg AD08823 | Single injection on day 1 |

[0347] Each of the MMP7 RNAi agents included N-acetyl-galactosamine targeting ligands conjugated to the 5′-terminal end of the sense strand, as shown in Tables 5 and 7B. The injections were performed between the skin and muscle (i. e. subcutaneous injections) into the loose skin over the neck and shoulder area. Four (4) mice in each group were tested (n=4). Serum was collected on day 8, day 15, day 22, and day 29, and SEAP expression levels were determined pursuant to the procedure set forth in Example 2, above. Data from the experiment are shown in the following Table 13, with Average SEAP reflecting the normalized average value of SEAP:

TABLE 13
Average SEAP normalized to pre-treatment and saline control
in MMP7-SEAP mice from Example 3.

| | Day 8 | | Day 15 | |
|---|---|---|---|---|
| | Avg | Std Dev | Avg | Std Dev |
| Group ID | SEAP | (+/−) | SEAP | (+/−) |
| Group 1 (Saline) | 1.000 | 0.509 | 1.000 | 0.414 |
| Group 2 3.0 mg/kg AD08797 | 0.217 | 0.044 | 0.187 | 0.112 |
| Group 3 3.0 mg/kg AD08798 | 0.259 | 0.070 | 0.189 | 0.048 |
| Group 4 3.0 mg/kg AD08801 | 0.265 | 0.073 | 0.401 | 0.155 |
| Group 5 3.0 mg/kg AD08802 | 0.237 | 0.036 | 0.216 | 0.082 |
| Group 6 3.0 mg/kg AD08803 | 0.125 | 0.044 | 0.104 | 0.070 |
| Group 7 3.0 mg/kg AD08804 | 0.227 | 0.103 | 0.195 | 0.063 |
| Group 8 3.0 mg/kg AD08805 | 0.145 | 0.098 | 0.129 | 0.143 |
| Group 9 3.0 mg/kg AD08815 | 0.150 | 0.014 | 0.069 | 0.028 |
| Group 10 3.0 mg/kg AD08816 | 0.643 | 0.716 | 0.288 | 0.119 |
| Group 11 3.0 mg/kg AD08823 | 0.129 | 0.026 | 0.075 | 0.030 |
| | Day 22 | | Day 29 | |
| | Avg | Std Dev | Avg | Std Dev |
| Group ID | SEAP | (+/−) | SEAP | (+/−) |
| Group 1 (Saline) | 1.000 | 0.581 | 1.000 | 0.464 |
| Group 2 3.0 mg/kg AD08797 | 0.221 | 0.021 | 0.381 | 0.082 |
| Group 3 3.0 mg/kg AD08798 | 0.227 | 0.066 | 0.377 | 0.170 |
| Group 4 3.0 mg/kg AD08801 | 0.434 | 0.109 | 0.577 | 0.108 |
| Group 5 3.0 mg/kg AD08802 | 0.220 | 0.082 | 0.279 | 0.136 |
| Group 6 3.0 mg/kg AD08803 | 0.075 | 0.050 | 0.081 | 0.039 |
| Group 7 3.0 mg/kg AD08804 | 0.169 | 0.034 | 0.299 | 0.083 |
| Group 8 3.0 mg/kg AD08805 | 0.223 | 0.317 | 0.414 | 0.568 |
| Group 9 3.0 mg/kg AD08815 | 0.057 | 0.028 | 0.111 | 0.068 |
| Group 10 3.0 mg/kg AD08816 | 0.247 | 0.075 | 0.375 | 0.212 |
| Group 11 3.0 mg/kg AD08823 | 0.092 | 0.070 | 0.093 | 0.089 |

[0348] Each of the MMP7 RNAi agents in each of the dosing groups (i.e., Groups 2 through 11) showed reduction in SEAP as compared to the saline control (Group 1) across all measured time points, which as described herein, indicates inhibition of MMP7 in the MMP7-SEAP mouse model.

### Example 4. In Vivo Testing of MMP7 RNAi Agents in MMP7-SEAP Mice

[0349] The MMP7-SEAP mouse model described in Example 2, above, was used. At day 1, each mouse was given a single subcutaneous injection of 200 μl per 20 g body weight containing either 3.0 mg/kg (mpk) of an MMP7 RNAi agent or saline without an MMP7 RNAi agent to be used as a control, according to the following Table 14.

TABLE 14
MMP7 RNAi Agent and Dosing for Example 4.

| Group ID | Dosing Regimen |
|---|---|
| Group 1 (isotonic saline) | Single injection on day 1 |
| Group 2 3.0 mg/kg AD08799 | Single injection on day 1 |
| Group 3 3.0 mg/kg AD08800 | Single injection on day 1 |
| Group 4 3.0 mg/kg AD08806 | Single injection on day 1 |
| Group 5 3.0 mg/kg AD08807 | Single injection on day 1 |
| Group 6 3.0 mg/kg AD08808 | Single injection on day 1 |
| Group 7 3.0 mg/kg AD08813 | Single injection on day 1 |
| Group 8 3.0 mg/kg AD08814 | Single injection on day 1 |
| Group 9 3.0 mg/kg AD08817 | Single injection on day 1 |
| Group 10 3.0 mg/kg AD08818 | Single injection on day 1 |

[0350] Each of the MMP7 RNAi agents included N-acetyl-galactosamine targeting ligands conjugated to the 5′-terminal end of the sense strand, as shown in Tables 5 and 7B. The injections were performed between the skin and muscle (i. e. subcutaneous injections) into the loose skin over the neck and shoulder area. Four (4) mice in each group were tested (n=4). Serum was collected on day 8, day 15, day 22, and day 29, and SEAP expression levels were determined pursuant to the procedure set forth in Example 2, above. Data from the experiment are shown in the following Table 15, with Average SEAP reflecting the normalized average value of SEAP:

TABLE 15
Average SEAP normalized to pre-treatment and saline control
in MMP7-SEAP mice from Example 4.

| | Day 8 | | Day 15 | |
|---|---|---|---|---|
| | Avg | Std Dev | Avg | Std Dev |
| Group ID | SEAP | (+/−) | SEAP | (+/−) |
| Group 1 (Saline) | 1.000 | 0.112 | 1.000 | 0.402 |
| Group 2 3.0 mg/kg AD08799 | 0.300 | 0.054 | 0.731 | 0.182 |
| Group 3 3.0 mg/kg AD08800 | 0.208 | 0.079 | 0.237 | 0.165 |
| Group 4 3.0 mg/kg AD08806 | 0.215 | 0.063 | 0.282 | 0.173 |
| Group 5 3.0 mg/kg AD08807 | 0.168 | 0.060 | 0.166 | 0.099 |
| Group 6 3.0 mg/kg AD08808 | 0.143 | 0.042 | 0.143 | 0.111 |
| Group 7 3.0 mg/kg AD08813 | 0.192 | 0.072 | 0.088 | 0.029 |
| Group 8 3.0 mg/kg AD08814 | 0.154 | 0.060 | 0.339 | 0.152 |
| Group 9 3.0 mg/kg AD08817 | 0.430 | 0.097 | 0.369 | 0.206 |
| Group 10 3.0 mg/kg AD08818 | 0.160 | 0.073 | 0.127 | 0.043 |
| | Day 22 | | Day 29 | |
| | Avg | Std Dev | Avg | Std Dev |
| Group ID | SEAP | (+/−) | SEAP | (+/−) |
| Group 1 (Saline) | 1.000 | 0.323 | 1.000 | 0.364 |
| Group 2 3.0 mg/kg AD08799 | 0.818 | 0.164 | 0.730 | 0.279 |
| Group 3 3.0 mg/kg AD08800 | 0.194 | 0.130 | 0.384 | 0.240 |
| Group 4 3.0 mg/kg AD08806 | 0.454 | 0.378 | 0.502 | 0.424 |
| Group 5 3.0 mg/kg AD08807 | 0.155 | 0.074 | 0.287 | 0.137 |
| Group 6 3.0 mg/kg AD08808 | 0.116 | 0.106 | 0.192 | 0.171 |
| Group 7 3.0 mg/kg AD08813 | 0.077 | 0.053 | 0.151 | 0.113 |
| Group 8 3.0 mg/kg AD08814 | 0.307 | 0.139 | 0.463 | 0.356 |
| Group 9 3.0 mg/kg AD08817 | 0.313 | 0.085 | 0.456 | 0.138 |
| Group 10 3.0 mg/kg AD08818 | 0.087 | 0.047 | 0.148 | 0.086 |

[0351] Each of the MMP7 RNAi agents in each of the dosing groups (i.e., Groups 2 through 10) showed reduction in SEAP as compared to the saline control (Group 1) across all measured time points, which as described herein, indicates inhibition of MMP7 in the MMP7-SEAP mouse model.

### Example 5. In Vivo Testing of MMP7 RNAi Agents in MMP7-SEAP Mice

[0352] The MMP7-SEAP mouse model described in Example 2, above, was used. At day 1, each mouse was given a single subcutaneous injection of 200 μl per 20 g body weight containing either 3.0 mg/kg (mpk) of an MMP7 RNAi agent, 1 mpk of an MMP7 RNAi agent, 0.3 mpk an MMP7 RNAi agent, or saline without an MMP7 RNAi agent to be used as a control, according to the following Table 16.

TABLE 16
MMP7 RNAi Agent and Dosing for Example 5.

| Group ID | Dosing Regimen |
|---|---|
| Group 1 (isotonic saline) | Single injection on day 1 |
| Group 2 3.0 mg/kg AD08809 | Single injection on day 1 |
| Group 3 3.0 mg/kg AD08811 | Single injection on day 1 |
| Group 4 3.0 mg/kg AD08812 | Single injection on day 1 |
| Group 5 3.0 mg/kg AD08819 | Single injection on day 1 |
| Group 6 3.0 mg/kg AD08820 | Single injection on day 1 |
| Group 7 3.0 mg/kg AD08821 | Single injection on day 1 |
| Group 8 3.0 mg/kg AD08822 | Single injection on day 1 |
| Group 9 3.0 mg/kg AD08815 | Single injection on day 1 |
| Group 10 1.0 mg/kg AD08815 | Single injection on day 1 |
| Group 11 0.3 mg/kg AD08815 | Single injection on day 1 |

[0353] Each of the MMP7 RNAi agents included N-acetyl-galactosamine targeting ligands conjugated to the 5′-terminal end of the sense strand, as shown in Tables 5 and 7B. The injections were performed between the skin and muscle (i. e. subcutaneous injections) into the loose skin over the neck and shoulder area. Four (4) mice in each group were tested (n=4). Serum was collected on day 8, day 15, day 22, and day 29, and SEAP expression levels were determined pursuant to the procedure set forth in Example 2, above. Data from the experiment are shown in the following Table 17, with Average SEAP reflecting the normalized average value of SEAP:

TABLE 17
Average SEAP normalized to pre-treatment and saline control
in MMP7-SEAP mice from Example 5.

| | Day 8 | | Day 15 | |
|---|---|---|---|---|
| | Avg | Std Dev | Avg | Std Dev |
| Group ID | SEAP | (+/−) | SEAP | (+/−) |
| Group 1 (Saline) | 1.000 | 0.264 | 1.000 | 0.478 |
| Group 2 3.0 mg/kg AD08809 | 0.807 | 0.283 | 0.853 | 0.441 |
| Group 3 3.0 mg/kg AD08811 | 0.177 | 0.046 | 0.111 | 0.076 |
| Group 4 3.0 mg/kg AD08812 | 0.704 | 0.342 | 0.567 | 0.143 |
| Group 5 3.0 mg/kg AD08819 | 0.549 | 0.079 | 0.405 | 0.083 |
| Group 6 3.0 mg/kg AD08820 | 0.133 | 0.022 | 0.046 | 0.020 |
| Group 7 3.0 mg/kg AD08821 | 0.148 | 0.061 | 0.051 | 0.028 |
| Group 8 3.0 mg/kg AD08822 | 0.111 | 0.025 | 0.048 | 0.018 |
| Group 9 3.0 mg/kg AD08815 | 0.193 | 0.043 | 0.097 | 0.043 |
| Group 10 1.0 mg/kg AD08815 | 0.630 | 0.139 | 0.299 | 0.087 |
| Group 11 0.3 mg/kg AD08815 | 0.789 | 0.185 | 0.493 | 0.157 |
| | Day 22 | | Day 29 | |
| | Avg | Std Dev | Avg | Std Dev |
| Group ID | SEAP | (+/−) | SEAP | (+/−) |
| Group 1 (Saline) | 1.000 | 0.556 | 1.000 | 0.398 |
| Group 2 3.0 mg/kg AD08809 | 0.797 | 0.396 | 0.920 | 0.517 |
| Group 3 3.0 mg/kg AD08811 | 0.118 | 0.099 | 0.202 | 0.137 |
| Group 4 3.0 mg/kg AD08812 | 0.994 | 0.384 | 0.565 | 0.079 |
| Group 5 3.0 mg/kg AD08819 | 0.375 | 0.045 | 0.652 | 0.148 |
| Group 6 3.0 mg/kg AD08820 | 0.040 | 0.022 | 0.087 | 0.065 |
| Group 7 3.0 mg/kg AD08821 | 0.038 | 0.025 | 0.050 | 0.023 |
| Group 8 3.0 mg/kg AD08822 | 0.038 | 0.016 | 0.085 | 0.030 |
| Group 9 3.0 mg/kg AD08815 | 0.078 | 0.030 | 0.156 | 0.065 |
| Group 10 1.0 mg/kg AD08815 | 0.395 | 0.074 | 0.650 | 0.179 |
| Group 11 0.3 mg/kg AD08815 | 0.625 | 0.152 | 0.819 | 0.291 |

[0354] Each of the MMP7 RNAi agents in each of the dosing groups (i.e., Groups 2 through 11) showed reduction in SEAP as compared to the saline control (Group 1) across all measured time points, which as described herein, indicates inhibition of MMP7 in the MMP7-SEAP mouse model.

### Example 6. In Vivo Testing of MMP7 RNAi Agents in MMP7-SEAP Mice

[0355] The MMP7-SEAP mouse model described in Example 2, above, was used. At day 1, each mouse was given a single subcutaneous injection of 200 μl per 20 g body weight containing either 2.0 mg/kg (mpk) of an MMP7 RNAi agent, 1.0 mpk of an MMP7 RNAi agent, or saline without an MMP7 RNAi agent to be used as a control, according to the following Table 18.

TABLE 18
MMP7 RNAi Agent and Dosing for Example 5.

| Group ID | Dosing Regimen |
|---|---|
| Group 1 (isotonic saline) | Single injection on day 1 |
| Group 2 2.0 mg/kg AD08815 | Single injection on day 1 |
| Group 3 1.0 mg/kg AD08815 | Single injection on day 1 |
| Group 4 2.0 mg/kg AD08823 | Single injection on day 1 |
| Group 5 1.0 mg/kg AD08823 | Single injection on day 1 |
| Group 6 2.0 mg/kg AD08803 | Single injection on day 1 |
| Group 7 1.0 mg/kg AD08803 | Single injection on day 1 |

[0356] Each of the MMP7 RNAi agents included N-acetyl-galactosamine targeting ligands conjugated to the 5′-terminal end of the sense strand, as shown in Tables 5 and 7B. The injections were performed between the skin and muscle (i. e. subcutaneous injections) into the loose skin over the neck and shoulder area. Four (4) mice in each of groups 1-6 were tested (n=4), and three (3) mice were tested in group 7 (n=3.) Serum was collected on day 8, day 15, day 22, and day 29, and SEAP expression levels were determined pursuant to the procedure set forth in Example 2, above. Data from the experiment are shown in the following Table 19, with Average SEAP reflecting the normalized average value of SEAP:

TABLE 19
Average SEAP normalized to pre-treatment and saline control
in MMP7-SEAP mice from Example 6.

| | Day 8 | | Day 15 | |
|---|---|---|---|---|
| | Avg | Std Dev | Avg | Std Dev |
| Group ID | SEAP | (+/−) | SEAP | (+/−) |
| Group 1 (Saline) | 1.000 | 0.637 | 1.000 | 0.354 |
| Group 2 2.0 mg/kg AD08815 | 0.261 | 0.086 | 0.169 | 0.099 |
| Group 3 1.0 mg/kg AD08815 | 0.307 | 0.198 | 0.435 | 0.277 |
| Group 4 2.0 mg/kg AD08823 | 0.230 | 0.172 | 0.140 | 0.042 |
| Group 5 1.0 mg/kg AD08823 | 0.543 | 0.250 | 0.266 | 0.079 |
| Group 6 2.0 mg/kg AD08803 | 0.617 | 0.294 | 0.204 | 0.109 |
| Group 7 1.0 mg/kg AD08803 | 0.320 | 0.145 | 0.283 | 0.063 |
| | Day 22 | | Day 29 | |
| | Avg | Std Dev | Avg | Std Dev |
| Group ID | SEAP | (+/−) | SEAP | (+/−) |
| Group 1 (Saline) | 1.000 | 0.235 | 1.000 | 0.302 |
| Group 2 2.0 mg/kg AD08815 | 0.157 | 0.143 | 0.256 | 0.092 |
| Group 3 1.0 mg/kg AD08815 | 0.343 | 0.171 | 0.522 | 0.233 |
| Group 4 2.0 mg/kg AD08823 | 0.212 | N/A* | 0.294 | 0.155 |
| Group 5 1.0 mg/kg AD08823 | 0.291 | 0.107 | 0.502 | 0.205 |
| Group 6 2.0 mg/kg AD08803 | 0.087 | 0.042 | 0.179 | 0.092 |
| Group 7 1.0 mg/kg AD08803 | 0.309 | 0.371 | 0.211 | N/A* |

*Only one mouse from the group was tested on the indicated day.

[0357] Each of the MMP7 RNAi agents in each of the dosing groups (i.e., Groups 2 through 7) showed reduction in SEAP as compared to the saline control (Group 1) across all measured time points, which as described herein, indicates inhibition of MMP7 in the MMP7-SEAP mouse model.

### Example 7. In Vivo Testing of MMP7 RNAi Agents in MMP7-SEAP Mice

[0358] The MMP7-SEAP mouse model described in Example 2, above, was used. At day 1, each mouse was given a single subcutaneous injection of 200 μl per 20 g body weight containing either 2.0 mg/kg (mpk) of an MMP7 RNAi agent, 1.0 mpk of an MMP7 RNAi agent, 0.5 mpk an MMP7 RNAi agent, or saline without an MMP7 RNAi agent to be used as a control, according to the following Table 20.

TABLE 20
MMP7 RNAi Agent and Dosing for Example 7.

| Group ID | Dosing Regimen |
|---|---|
| Group 1 (isotonic saline) | Single injection on day 1 |
| Group 2 2.0 mg/kg AD08808 | Single injection on day 1 |
| Group 3 1.0 mg/kg AD08808 | Single injection on day 1 |
| Group 4 0.5 mg/kg AD08808 | Single injection on day 1 |
| Group 5 2.0 mg/kg AD08818 | Single injection on day 1 |
| Group 6 1.0 mg/kg AD08818 | Single injection on day 1 |
| Group 7 0.5 mg/kg AD08818 | Single injection on day 1 |

[0359] Each of the MMP7 RNAi agents included N-acetyl-galactosamine targeting ligands conjugated to the 5′-terminal end of the sense strand, as shown in Tables 5 and 7B. The injections were performed between the skin and muscle (i.e. subcutaneous injections) into the loose skin over the neck and shoulder area. Four (4) mice in each group were tested (n=4). Serum was collected on day 8, day 15, day 22, and day 29, and SEAP expression levels were determined pursuant to the procedure set forth in Example 2, above. Data from the experiment are shown in the following Table 21, with Average SEAP reflecting the normalized average value of SEAP.

TABLE 21
Average SEAP normalized to pre-treatment and saline control
in MMP7-SEAP mice from Example 7.

| | Day 8 | | Day 15 | |
|---|---|---|---|---|
| | Avg | Std Dev | Avg | Std Dev |
| Group ID | SEAP | (+/−) | SEAP | (+/−) |
| Group 1 (Saline) | 1.000 | 0.199 | 1.000 | 0.169 |
| Group 2 2.0 mg/kg AD08808 | 0.281 | 0.137 | 0.373 | 0.417 |
| Group 3 1.0 mg/kg AD08808 | 0.432 | 0.087 | 0.547 | 0.191 |
| Group 4 0.5 mg/kg AD08808 | 0.646 | 0.331 | 0.589 | 0.217 |
| Group 5 2.0 mg/kg AD08818 | 0.403 | 0.158 | 0.462 | 0.442 |
| Group 6 1.0 mg/kg AD08818 | 0.793 | 0.229 | 0.623 | 0.256 |
| Group 7 0.5 mg/kg AD08818 | 0.649 | 0.092 | 0.669 | 0.266 |
| | Day 22 | | Day 29 | |
| | Avg | Std Dev | Avg | Std Dev |
| Group ID | SEAP | (+/−) | SEAP | (+/−) |
| Group 1 (Saline) | 1.000 | 0.229 | 1.000 | 0.135 |
| Group 2 2.0 mg/kg AD08808 | 0.056 | 0.020 | 0.049 | N/A* |
| Group 3 1.0 mg/kg AD08808 | 0.355 | 0.176 | 0.434 | 0.080 |
| Group 4 0.5 mg/kg AD08808 | 0.649 | 0.559 | 0.639 | 0.102 |
| Group 5 2.0 mg/kg AD08818 | 0.286 | 0.294 | 0.298 | 0.313 |
| Group 6 1.0 mg/kg AD08818 | 0.485 | 0.102 | 0.404 | 0.243 |
| Group 7 0.5 mg/kg AD08818 | 0.531 | 0.271 | 0.845 | 0.635 |

*Only one mouse was tested on this day.

[0360] Each of the MMP7 RNAi agents in each of the dosing groups (i.e., Groups 2 through 7) showed reduction in SEAP as compared to the saline control (Group 1) across all measured time points, which as described herein, indicates inhibition of MMP7 in the MMP7-SEAP mouse model.

### Example 8. In Vivo Testing of MMP7 RNAi Agents in MMP7-SEAP Mice

[0361] The MMP7-SEAP mouse model described in Example 2, above, was used. At day 1, each mouse was given a single subcutaneous injection of 200 μl per 20 g body weight containing either 2.0 mg/kg (mpk) of an MMP7 RNAi agent, 1 mpk of an MMP7 RNAi agent, or saline without an MMP7 RNAi agent to be used as a control, according to the following Table 22.

TABLE 22
MMP7 RNAi Agent and Dosing for Example 8.

| Group ID | Dosing Regimen |
|---|---|
| Group 1 (isotonic saline) | Single injection on day 1 |
| Group 2 2.0 mg/kg AD08813 | Single injection on day 1 |
| Group 3 1.0 mg/kg AD08813 | Single injection on day 1 |
| Group 4 2.0 mg/kg AD08811 | Single injection on day 1 |
| Group 5 1.0 mg/kg AD08811 | Single injection on day 1 |
| Group 6 2.0 mg/kg AD08820 | Single injection on day 1 |
| Group 7 1.0 mg/kg AD08820 | Single injection on day 1 |
| Group 8 2.0 mg/kg AD08821 | Single injection on day 1 |
| Group 9 1.0 mg/kg AD08821 | Single injection on day 1 |
| Group 10 2.0 mg/kg AD08822 | Single injection on day 1 |
| Group 11 1.0 mg/kg AD08822 | Single injection on day 1 |

[0362] Each of the MMP7 RNAi agents included N-acetyl-galactosamine targeting ligands conjugated to the 5′-terminal end of the sense strand, as shown in Tables 5 and 7B. The injections were performed between the skin and muscle (i. e. subcutaneous injections) into the loose skin over the neck and shoulder area. Four (4) mice in each group were tested (n=4). Serum was collected on day 8, day 15, day 22, and day 29, and SEAP expression levels were determined pursuant to the procedure set forth in Example 2, above. Data from the experiment are shown in the following Table 23, with Average SEAP reflecting the normalized average value of SEAP:

TABLE 23
Average SEAP normalized to pre-treatment and saline control
in MMP7-SEAP mice from Example 8.

| | Day 8 | | Day 15 | |
|---|---|---|---|---|
| | Avg | Std Dev | Avg | Std Dev |
| Group ID | SEAP | (+/−) | SEAP | (+/−) |
| Group 1 (Saline) | 1.000 | 0.270 | 1.000 | 0.275 |
| Group 2 2.0 mg/kg AD08813 | 0.268 | 0.129 | 0.102 | 0.023 |
| Group 3 1.0 mg/kg AD08813 | 0.485 | 0.139 | 0.447 | 0.181 |
| Group 4 2.0 mg/kg AD08811 | 0.158 | 0.063 | 0.121 | 0.066 |
| Group 5 1.0 mg/kg AD08811 | 0.223 | 0.079 | 0.277 | 0.135 |
| Group 6 2.0 mg/kg AD08820 | 0.134 | 0.054 | ND** | ND** |
| Group 7 1.0 mg/kg AD08820 | 0.282 | 0.151 | 0.138 | 0.084 |
| Group 8 2.0 mg/kg AD08821 | 0.124 | 0.079 | 0.036 | N/A* |
| Group 9 1.0 mg/kg AD08821 | 0.607 | 0.226 | 0.121 | 0.061 |
| Group 10 2.0 mg/kg AD08822 | 0.860 | 0.320 | 0.058 | N/A* |
| Group 11 1.0 mg/kg AD08822 | 0.558 | 0.193 | 0.194 | 0.099 |
| | Day 22 | | Day 29 | |
| | Avg | Std Dev | Avg | Std Dev |
| Group ID | SEAP | (+/−) | SEAP | (+/−) |
| Group 1 (Saline) | 1.000 | 0.408 | 1.000 | 0.388 |
| Group 2 2.0 mg/kg AD08813 | 0.137 | 0.089 | 0.168 | 0.060 |
| Group 3 1.0 mg/kg AD08813 | 0.355 | 0.133 | 0.338 | 0.095 |
| Group 4 2.0 mg/kg AD08811 | 0.177 | 0.072 | 0.249 | 0.083 |
| Group 5 1.0 mg/kg AD08811 | 0.311 | 0.086 | 0.417 | 0.170 |
| Group 6 2.0 mg/kg AD08820 | 0.024 | 0.026 | 0.055 | 0.036 |
| Group 7 1.0 mg/kg AD08820 | 0.110 | 0.060 | 0.195 | 0.062 |
| Group 8 2.0 mg/kg AD08821 | 0.028 | N/A* | 0.084 | N/A* |
| Group 9 1.0 mg/kg AD08821 | 0.172 | 0.051 | 0.143 | 0.116 |
| Group 10 2.0 mg/kg AD08822 | 0.093 | 0.030 | 0.082 | N/A* |
| Group 11 1.0 mg/kg AD08822 | 0.131 | 0.047 | 0.319 | 0.125 |

*Only one mouse was tested on the day indicated
**No mice were tested on the day indicated

[0363] Each of the MMP7 RNAi agents in each of the dosing groups (i.e., Groups 2 througw 11) showed reduction in SEAP as compared to the saline control (Group 1) across all measured time points, which as described herein, indicates inhibition of MMP7 in the MMP7-SEAP mouse model.

### Example 9. In Vivo Testing of MMP7 RNAi Agents in MMP7-SEAP Mice

[0364] The MMP7-SEAP mouse model described in Example 2, above, was used. At day 1, each mouse was given a single subcutaneous injection of 200 μl per 20 g body weight containing either 1.5 mg/kg (mpk) of an MMP7 RNAi agent, or saline without an MMP7 RNAi agent to be used as a control, according to the following Table 24.

TABLE 24
MMP7 RNAi Agent and Dosing for Example 9.

| Group ID | Dosing Regimen |
|---|---|
| Group 1 (isotonic saline) | Single injection on day 1 |
| Group 2 1.5 mg/kg AD08815 | Single injection on day 1 |
| Group 3 1.5 mg/kg AD09243 | Single injection on day 1 |
| Group 4 1.5 mg/kg AD09244 | Single injection on day 1 |
| Group 5 1.5 mg/kg AD09245 | Single injection on day 1 |
| Group 6 1.5 mg/kg AD09246 | Single injection on day 1 |
| Group 7 1.5 mg/kg AD09247 | Single injection on day 1 |
| Group 8 1.5 mg/kg AD09248 | Single injection on day 1 |

[0365] Each of the MMP7 RNAi agents included N-acetyl-galactosamine targeting ligands conjugated to the 5′-terminal end of the sense strand, as shown in Tables 5 and 7B. The injections were performed between the skin and muscle (i. e. subcutaneous injections) into the loose skin over the neck and shoulder area. Four (4) mice in each group were tested (n=4). Serum was collected on day 8, day 15, day 22, and day 29, and SEAP expression levels were determined pursuant to the procedure set forth in Example 2, above. Data from the experiment are shown in the following Table 25, with Average SEAP reflecting the normalized average value of SEAP:

TABLE 25
Average SEAP normalized to pre-treatment and saline control
in MMP7-SEAP mice from Example 8.

| | Day 8 | | Day 15 | |
|---|---|---|---|---|
| | Avg | Std Dev | Avg | Std Dev |
| Group ID | SEAP | (+/−) | SEAP | (+/−) |
| Group 1 (Saline) | 1.000 | 0.440 | 1.000 | 0.145 |
| Group 2 1.5 mg/kg AD08815 | 0.569 | 0.186 | 0.152 | 0.065 |
| Group 3 1.5 mg/kg AD09243 | 0.282 | 0.154 | 0.075 | 0.049 |
| Group 4 1.5 mg/kg AD09244 | 0.535 | 0.169 | 0.270 | 0.122 |
| Group 5 1.5 mg/kg AD09245 | 0.659 | 0.190 | 0.211 | 0.140 |
| Group 6 1.5 mg/kg AD09246 | 0.528 | 0.100 | 0.199 | 0.110 |
| Group 7 1.5 mg/kg AD09247 | 0.613 | 0.227 | 0.269 | 0.086 |
| Group 8 1.5 mg/kg AD09248 | 1.047** | 1.439 | 0.259 | 0.079 |
| | Day 22 | | Day 29 | |
| | Avg | Std Dev | Avg | Std Dev |
| Group ID | SEAP | (+/−) | SEAP | (+/−) |
| Group 1 (Saline) | 1.000 | 0.436 | 1.000 | 0.530 |
| Group 2 1.5 mg/kg AD08815 | 0.195 | 0.071 | 0.576 | 0.425 |
| Group 3 1.5 mg/kg AD09243 | 0.095 | N/A* | 0.400 | 0.291 |
| Group 4 1.5 mg/kg AD09244 | 0.203 | 0.147 | 0.479 | 0.357 |
| Group 5 1.5 mg/kg AD09245 | 0.161 | 0.012 | 0.406 | 0.278 |
| Group 6 1.5 mg/kg AD09246 | 0.190 | 0.167 | 0.426 | 0.258 |
| Group 7 1.5 mg/kg AD09247 | 0.233 | 0.106 | 0.359 | 0.122 |
| Group 8 1.5 mg/kg AD09248 | 0.280 | 0.192 | 0.411 | 0.136 |

*Only one mouse was tested on the day indicated
**On Day 8, one animal in group 8 had a high signal

[0366] Each of the MMP7 RNAi agents in each of the dosing groups (i.e., Groups 2 through 8) showed reduction in SEAP as compared to the saline control (Group 1) across all measured time points (with the exception of Group 8 on day 8), which as described herein, indicates inhibition of MMP7 in the MMP7-SEAP mouse model.

### Example 10. In Vivo Testing of MMP7 RNAi Agents in MMP7-SEAP Mice

[0367] The MMP7-SEAP mouse model described in Example 2, above, was used. At day 1, each mouse was given a single subcutaneous injection of 200 μl per 20 g body weight containing either 2.0 mg/kg (mpk) of an MMP7 RNAi agent, 1.0 mpk of an MMP7 RNAi agent, or saline without an MMP7 RNAi agent to be used as a control, according to the following Table 26.

TABLE 26
MMP7 RNAi Agent and Dosing for Example 10.

| Group ID | Dosing Regimen |
|---|---|
| Group 1 (isotonic saline) | Single injection on day 1 |
| Group 2 2.0 mg/kg AD08815 | Single injection on day 1 |
| Group 3 1.0 mg/kg AD08815 | Single injection on day 1 |
| Group 4 2.0 mg/kg AD08821 | Single injection on day 1 |
| Group 5 1.0 mg/kg AD08821 | Single injection on day 1 |
| Group 6 2.0 mg/kg AD08808 | Single injection on day 1 |
| Group 7 1.0 mg/kg AD08808 | Single injection on day 1 |
| Group 8 2.0 mg/kg AD08813 | Single injection on day 1 |
| Group 9 1.0 mg/kg AD08813 | Single injection on day 1 |

[0368] Each of the MMP7 RNAi agents included N-acetyl-galactosamine targeting ligands conjugated to the 5′-terminal end of the sense strand, as shown in Tables 5 and 7B. The injections were performed between the skin and muscle (i.e. subcutaneous injections) into the loose skin over the neck and shoulder area. Four (4) mice in each group were tested (n=4). Serum was collected on day 8, day 15, day 22, and day 29, and SEAP expression levels were determined pursuant to the procedure set forth in Example 2, above. Data from the experiment are shown in the following Table 27, with Average SEAP reflecting the normalized average value of SEAP:

TABLE 27
Average SEAP normalized to pre-treatment and saline
control in MMP7-SEAP mice from Example 10.

| | Day 8 | | Day 15 | |
|---|---|---|---|---|
| | Avg | Std Dev | Avg | Std Dev |
| Group ID | SEAP | (+/−) | SEAP | (+/−) |
| Group 1 (Saline) | 1.000 | 0.468 | 1.000 | 0.469 |
| Group 2 2.0 mg/kg AD08815 | 0.170 | 0.102 | 0.177 | 0.195 |
| Group 3 1.0 mg/kg AD08815 | 0.365 | 0.193 | 0.330 | 0.161 |
| Group 4 2.0 mg/kg AD08821 | 0.109 | 0.054 | 0.069 | 0.061 |
| Group 5 1.0 mg/kg AD08821 | 0.134 | 0.045 | 0.115 | 0.046 |
| Group 6 2.0 mg/kg AD08808 | 0.115 | 0.034 | 0.107 | 0.023 |
| Group 7 1.0 mg/kg AD08808 | 0.178 | 0.057 | 0.209 | 0.130 |
| Group 8 2.0 mg/kg AD08813 | 0.167 | 0.047 | 0.108 | 0.065 |
| Group 9 1.0 mg/kg AD08813 | 0.224 | 0.028 | 0.190 | 0.091 |
| | Day 22 | | Day 29 | |
| | Avg | Std Dev | Avg | Std Dev |
| Group ID | SEAP | (+/−) | SEAP | (+/−) |
| Group 1 (Saline) | 1.000 | 0.300 | 1.000 | 0.297 |
| Group 2 2.0 mg/kg AD08815 | 0.158 | 0.131 | 0.226 | 0.232 |
| Group 3 1.0 mg/kg AD08815 | 0.439 | 0.277 | 0.457 | 0.383 |
| Group 4 2.0 mg/kg AD08821 | 0.095 | 0.074 | 0.110 | 0.092 |
| Group 5 1.0 mg/kg AD08821 | 0.289 | 0.259 | 0.412 | 0.331 |
| Group 6 2.0 mg/kg AD08808 | 0.179 | 0.077 | 0.373 | 0.294 |
| Group 7 1.0 mg/kg AD08808 | 0.299 | 0.124 | 0.397 | 0.201 |
| Group 8 2.0 mg/kg AD08813 | 0.133 | 0.083 | 0.244 | 0.217 |
| Group 9 1.0 mg/kg AD08813 | 0.324 | 0.149 | 0.360 | 0.134 |

[0369] Each of the MMP7 RNAi agents in each of the dosing groups (i.e., Groups 2 through 9) showed reduction in SEAP as compared to the saline control (Group 1) across all measured time points, which as described herein, indicates inhibition of MMP7 in the MMP7-SEAP mouse model.

### Example 11. In Vivo Testing of MMP7 RNAi Agents in MMP7-SEAP Mice

[0370] The MMP7-SEAP mouse model described in Example 2, above, was used. At day 1, each mouse was given a single subcutaneous injection of 200 μl per 20 g body weight containing either 1.0 mpk of an MMP7 RNAi agent, or saline without an MMP7 RNAi agent to be used as a control, according to the following Table 28.

TABLE 28
MMP7 RNAi Agent and Dosing for Example 11.

| Group ID | Dosing Regimen |
|---|---|
| Group 1 (isotonic saline) | Single injection on day 1 |
| Group 2 1.0 mg/kg AD08808 | Single injection on day 1 |
| Group 3 1.0 mg/kg AD09330 | Single injection on day 1 |
| Group 4 1.0 mg/kg AD09331 | Single injection on day 1 |
| Group 5 1.0 mg/kg AD09332 | Single injection on day 1 |
| Group 6 1.0 mg/kg AD09333 | Single injection on day 1 |
| Group 7 1.0 mg/kg AD08821 | Single injection on day 1 |
| Group 8 1.0 mg/kg AD09349 | Single injection on day 1 |
| Group 9 1.0 mg/kg AD09350 | Single injection on day 1 |
| Group 10 1.0 mg/kg AD09351 | Single injection on day 1 |
| Group 11 1.0 mg/kg AD09352 | Single injection on day 1 |

[0371] Each of the MMP7 RNAi agents included N-acetyl-galactosamine targeting ligands conjugated to the 5′-terminal end of the sense strand, as shown in Tables 5 and 7B. The injections were performed between the skin and muscle (i.e. subcutaneous injections) into the loose skin over the neck and shoulder area. Four (4) mice in each group were tested (n=4). Serum was collected on day 8, day 15, day 22, and day 29, and SEAP expression levels were determined pursuant to the procedure set forth in Example 2, above. Data from the experiment are shown in the following Table 29, with Average SEAP reflecting the normalized average value of SEAP.

TABLE 29
Average SEAP normalized to pre-treatment and saline
control in MMP7-SEAP mice from Example 11.

| | Day 8 | | Day 15 | |
|---|---|---|---|---|
| | Avg | Std Dev | Avg | Std Dev |
| Group ID | SEAP | (+/−) | SEAP | (+/−) |
| Group 1 (Saline) | 1.000 | 0.440 | 1.000 | 0.419 |
| Group 2 1.0 mg/kg AD08808 | 0.756 | 0.932 | 0.745 | 0.928 |
| Group 3 1.0 mg/kg AD09330 | 0.457 | 0.186 | 0.444 | 0.178 |
| Group 4 1.0 mg/kg AD09331 | 0.475 | 0.193 | 0.470 | 0.191 |
| Group 5 1.0 mg/kg AD09332 | 0.380 | 0.198 | 0.367 | 0.184 |
| Group 6 1.0 mg/kg AD09333 | 0.357 | 0.142 | 0.384 | 0.165 |
| Group 7 1.0 mg/kg AD08821 | 0.304 | 0.110 | 0.314 | 0.110 |
| Group 8 1.0 mg/kg AD09349 | 0.258 | 0.117 | 0.261 | 0.117 |
| Group 9 1.0 mg/kg AD09350 | 0.362 | 0.082 | 0.365 | 0.079 |
| Group 10 1.0 mg/kg AD09351 | 0.419 | 0.260 | 0.407 | 0.242 |
| Group 11 1.0 mg/kg AD09352 | 0.281 | 0.049 | 0.281 | 0.031 |
| | Day 22 | | Day 29 | |
| Group ID | Avg | Std Dev | Avg | Std Dev |
| | SEAP | (+/−) | SEAP | (+/−) |
| Group 1 (Saline) | 1.000 | 0.345 | 1.000 | 0.415 |
| Group 2 1.0 mg/kg AD08808 | 0.569 | 0.538 | 0.534 | 0.485 |
| Group 3 1.0 mg/kg AD09330 | 0.361 | 0.155 | 0.408 | 0.188 |
| Group 4 1.0 mg/kg AD09331 | 0.310 | 0.124 | 0.299 | 0.139 |
| Group 5 1.0 mg/kg AD09332 | 0.323 | 0.208 | 0.348 | 0.206 |
| Group 6 1.0 mg/kg AD09333 | 0.329 | 0.165 | 0.243 | 0.112 |
| Group 7 1.0 mg/kg AD08821 | 0.257 | 0.173 | 0.304 | 0.219 |
| Group 8 1.0 mg/kg AD09349 | 0.276 | 0.260 | 0.152 | 0.147 |
| Group 9 1.0 mg/kg AD09350 | 0.300 | 0.092 | 0.134 | 0.030 |
| Group 10 1.0 mg/kg AD09351 | 0.307 | 0.215 | 0.327 | 0.298 |
| Group 11 1.0 mg/kg AD09352 | 0.212 | 0.078 | 0.173 | 0.058 |

[0372] Each of the MMP7 RNAi agents in each of the dosing groups (i.e., Groups 2 through 11) showed reduction in SEAP as compared to the saline control (Group 1) across all measured time points, which as described herein, indicates inhibition of MMP7 in the MMP7-SEAP mouse model.

### Example 12. In Vivo Testing of MMP7 RNAi Agents in MMP7-SEAP Mice

[0373] The MMP7-SEAP mouse model described in Example 2, above, was used. At day 1, each mouse was given a single subcutaneous injection of 200 μl per 20 g body weight containing either 1.0 mpk of an MMP7 RNAi agent, or saline without an MMP7 RNAi agent to be used as a control, according to the following Table 30.

TABLE 30
MMP7 RNAi Agent and Dosing for Example 12.

| Group ID | Dosing Regimen |
|---|---|
| Group 1 (isotonic saline) | Single injection on day 1 |
| Group 2 1.0 mg/kg AD08813 | Single injection on day 1 |
| Group 3 1.0 mg/kg AD09334 | Single injection on day 1 |
| Group 4 1.0 mg/kg AD09335 | Single injection on day 1 |
| Group 5 1.0 mg/kg AD09336 | Single injection on day 1 |
| Group 6 1.0 mg/kg AD09337 | Single injection on day 1 |
| Group 7 1.0 mg/kg AD08811 | Single injection on day 1 |
| Group 8 1.0 mg/kg AD09354 | Single injection on day 1 |
| Group 9 1.0 mg/kg AD09355 | Single injection on day 1 |
| Group 10 1.0 mg/kg AD09356 | Single injection on day 1 |
| Group 11 1.0 mg/kg AD09357 | Single injection on day 1 |
| Group 12 1.0 mg/kg AD09358 | Single injection on day 1 |

[0374] Each of the MMP7 RNAi agents included N-acetyl-galactosamine targeting ligands conjugated to the 5′-terminal end of the sense strand, as shown in Tables 5 and 7B. The injections were performed between the skin and muscle (i.e. subcutaneous injections) into the loose skin over the neck and shoulder area. Four (4) mice in each group were tested (n=4). Serum was collected on day 8, day 15, and day 22, and SEAP expression levels were determined pursuant to the procedure set forth in Example 2, above. Data from the experiment are shown in the following Table 31, with Average SEAP reflecting the normalized average value of SEAP.

TABLE 31
Average SEAP normalized to pre-treatment and saline
control in MMP7-SEAP mice from Example 12.

| | Day 8 | | Day 15 | |
|---|---|---|---|---|
| | Avg | Std Dev | Avg | Std Dev |
| Group ID | SEAP | (+/−) | SEAP | (+/−) |
| Group 1 (Saline) | 1.000 | 0.303 | 1.000 | 0.313 |
| Group 2 1.0 mg/kg AD08813 | 0.889 | 0.357 | 0.342 | 0.166 |
| Group 3 1.0 mg/kg AD09334 | 0.924 | 0.368 | 0.587 | 0.256 |
| Group 4 1.0 mg/kg AD09335 | 0.869 | 0.269 | 0.680 | 0.414 |
| Group 5 1.0 mg/kg AD09336 | 0.826 | 0.233 | 0.468 | 0.146 |
| Group 6 1.0 mg/kg AD09337 | 0.850 | 0.176 | 0.483 | 0.195 |
| Group 7 1.0 mg/kg AD08811 | 0.454 | 0.147 | 0.249 | 0.185 |
| Group 8 1.0 mg/kg AD09354 | 0.833 | 0.353 | 0.678 | 0.349 |
| Group 9 1.0 mg/kg AD09355 | 0.715 | 0.174 | 0.485 | 0.191 |
| Group 10 1.0 mg/kg AD09356 | 1.182 | 0.280 | 0.428 | 0.351 |
| Group 11 1.0 mg/kg AD09357 | 0.897 | 0.384 | 0.491 | 0.224 |
| Group 12 1.0 mg/kg AD09358 | 0.701 | 0.237 | 0.465 | 0.126 |

| | Day 22 | |
|---|---|---|
| | Avg | Std Dev |
| Group ID | SEAP | (+/−) |
| Group 1 (Saline) | 1.000 | 0.460 |
| Group 2 1.0 mg/kg AD08813 | 0.495 | 0.322 |
| Group 3 1.0 mg/kg AD09334 | 0.574 | 0.266 |
| Group 4 1.0 mg/kg AD09335 | 0.563 | 0.335 |
| Group 5 1.0 mg/kg AD09336 | 0.721 | 0.282 |
| Group 6 1.0 mg/kg AD09337 | 0.603 | 0.300 |
| Group 7 1.0 mg/kg AD08811 | 0.982 | 0.517 |
| Group 8 1.0 mg/kg AD09354 | 0.386 | 0.268 |
| Group 9 1.0 mg/kg AD09355 | 0.615 | 0.152 |
| Group 10 1.0 mg/kg AD09356 | 1.188 | 0.560 |
| Group 11 1.0 mg/kg AD09357 | 0.862 | 0.427 |
| Group 12 1.0 mg/kg AD09358 | 0.828 | 0.248 |

[0375] Each of the MMP7 RNAi agents in each of the dosing groups except for Group 10 (i.e., Groups 2 through 9 and 11 and 12) showed reduction in SEAP as compared to the saline control (Group 1) across all measured time points, which as described herein, indicates inhibition of MMP7 in the MMP7-SEAP mouse model.

### Example 13. In Vivo Testing of MMP7 RNAi Agents in MMP7-SEAP Mice

[0376] The MMP7-SEAP mouse model described in Example 2, above, was used. At day 1, each mouse was given a single subcutaneous injection of 200 μl per 20 g body weight containing either 1.0 mpk of an MMP7 RNAi agent, or saline without an MMP7 RNAi agent to be used as a control, according to the following Table 32.

TABLE 32
MMP7 RNAi Agent and Dosing for Example 13.

| Group ID | Dosing Regimen |
|---|---|
| Group 1 (isotonic saline) | Single injection on day 1 |
| Group 2 1.0 mg/kg AD08803 | Single injection on day 1 |
| Group 3 1.0 mg/kg AD09441 | Single injection on day 1 |
| Group 4 1.0 mg/kg AD09442 | Single injection on day 1 |
| Group 5 1.0 mg/kg AD09443 | Single injection on day 1 |
| Group 6 1.0 mg/kg AD09444 | Single injection on day 1 |
| Group 7 1.0 mg/kg AD08823 | Single injection on day 1 |
| Group 8 1.0 mg/kg AD09445 | Single injection on day 1 |
| Group 9 1.0 mg/kg AD09446 | Single injection on day 1 |
| Group 10 1.0 mg/kg AD09447 | Single injection on day 1 |
| Group 11 1.0 mg/kg AD09448 | Single injection on day 1 |

[0377] Each of the MMP7 RNAi agents included N-acetyl-galactosamine targeting ligands conjugated to the 5′-terminal end of the sense strand, as shown in Tables 5 and 7B. The injections were performed between the skin and muscle (i.e. subcutaneous injections) into the loose skin over the neck and shoulder area. Four (4) mice in each group were tested (n=4). Serum was collected on day 8, day 15, day 22, and day 29, and SEAP expression levels were determined pursuant to the procedure set forth in Example 2, above. Data from the experiment are shown in the following Table 33, with Average SEAP reflecting the normalized average value of SEAP.

TABLE 33
Average SEAP normalized to pre-treatment and saline
control in MMP7-SEAP mice from Example 13.

| | Day 8 | | Day 15 | |
|---|---|---|---|---|
| | Avg | Std Dev | Avg | Std Dev |
| Group ID | SEAP | (+/−) | SEAP | (+/−) |
| Group 1 (Saline) | 1.000 | 0.210 | 1.000 | 0.188 |
| Group 2 1.0 mg/kg AD08803 | 0.383 | 0.125 | 0.387 | 0.143 |
| Group 3 1.0 mg/kg AD09441 | 0.785 | 0.192 | 0.695 | 0.185 |
| Group 4 1.0 mg/kg AD09442 | 0.780 | 0.285 | 0.820 | 0.321 |
| Group 5 1.0 mg/kg AD09443 | 0.749 | 0.353 | 0.733 | 0.493 |
| Group 6 1.0 mg/kg AD09444 | 0.451 | 0.208 | 0.342 | 0.094 |
| Group 7 1.0 mg/kg AD08823 | 0.249 | 0.064 | 0.189 | 0.079 |
| Group 8 1.0 mg/kg AD09445 | 0.260 | 0.095 | 0.135 | 0.103 |
| Group 9 1.0 mg/kg AD09446 | 0.162 | 0.056 | 0.162 | 0.086 |
| Group 10 1.0 mg/kg AD09447 | 0.177 | 0.030 | 0.126 | 0.049 |
| Group 11 1.0 mg/kg AD09448 | 0.360 | 0.139 | 0.273 | 0.126 |
| | Day 22 | | Day 29 | |
| | Avg | Std Dev | Avg | Std Dev |
| Group ID | SEAP | (+/−) | SEAP | (+/−) |
| Group 1 (Saline) | 1.000 | 0.376 | 1.000 | 0.429 |
| Group 2 1.0 mg/kg AD08803 | 0.418 | 0.101 | ND* | ND* |
| Group 3 1.0 mg/kg AD09441 | 0.826 | 0.393 | ND* | ND* |
| Group 4 1.0 mg/kg AD09442 | 1.186 | 0.656 | ND* | ND* |
| Group 5 1.0 mg/kg AD09443 | 0.940 | 0.656 | ND* | ND* |
| Group 6 1.0 mg/kg AD09444 | 0.568 | 0.230 | ND* | ND* |
| Group 7 1.0 mg/kg AD08823 | 0.295 | 0.169 | 0.655 | 0.373 |
| Group 8 1.0 mg/kg AD09445 | 0.307 | 0.262 | 0.519 | 0.397 |
| Group 9 1.0 mg/kg AD09446 | 0.173 | 0.113 | 0.338 | 0.238 |
| Group 10 1.0 mg/kg AD09447 | 0.182 | 0.061 | 0.299 | 0.081 |
| Group 11 1.0 mg/kg AD09448 | 0.545 | 0.352 | 0.699 | 0.384 |

*Mice from Groups 2-6 were euthanized prior to day 29

[0378] Each of the MMP7 RNAi agents in each of the dosing groups, except for Group 4 on day 22 (i.e., Groups 2, 3 and 5 through 11), showed reduction in SEAP as compared to the saline control (Group 1) across all measured time points, which as described herein, indicates inhibition of MMP7 in the MMP7-SEAP mouse model.

### Example 14. In Vivo Testing of MMP7 RNAi Agents in MMP7-SEAP Mice

[0379] The MMP7-SEAP mouse model described in Example 2, above, was used. At day 1, each mouse was given a single subcutaneous injection of 200 μl per 20 g body weight containing either 3.0 mg/kg (mpk) of an MMP7 RNAi agent, 1.0 mpk of an MMP7 RNAi agent, 0.3 mpk of an MMP7 RNAi agent, or saline without an MMP7 RNAi agent to be used as a control, according to the following Table 34.

TABLE 34
MMP7 RNAi Agent and Dosing for Example 14.

| Group ID | Dosing Regimen |
|---|---|
| Group 1 (isotonic saline) | Single injection on day 1 |
| Group 2 0.3 mg/kg AD08821 | Single injection on day 1 |
| Group 3 1.0 mg/kg AD08821 | Single injection on day 1 |
| Group 4 3.0 mg/kg AD08821 | Single injection on day 1 |
| Group 5 0.3 mg/kg AD09350 | Single injection on day 1 |
| Group 6 1.0 mg/kg AD09350 | Single injection on day 1 |
| Group 7 3.0 mg/kg AD09350 | Single injection on day 1 |
| Group 8 0.3 mg/kg AD09352 | Single injection on day 1 |
| Group 9 1.0 mg/kg AD09352 | Single injection on day 1 |
| Group 10 3.0 mg/kg AD09352 | Single injection on day 1 |

[0380] Each of the MMP7 RNAi agents included N-acetyl-galactosamine targeting ligands conjugated to the 5′-terminal end of the sense strand, as shown in Tables 5 and 7B. The injections were performed between the skin and muscle (i.e. subcutaneous injections) into the loose skin over the neck and shoulder area. Four (4) mice in each group were tested (n=4). Serum was collected on day 8, day 15, day 22, and SEAP expression levels were determined pursuant to the procedure set forth in Example 2, above. Data from the experiment are shown in the following Table 35, with Average SEAP reflecting the normalized average value of SEAP.

TABLE 35
Average SEAP normalized to pre-treatment and saline
control in MMP7-SEAP mice from Example 14.

| | Day 8 | | Day 15 | |
|---|---|---|---|---|
| | Avg | Std Dev | Avg | Std Dev |
| Group ID | SEAP | (+/−) | SEAP | (+/−) |
| Group 1 (Saline) | 1.000 | 0.482 | 1.000 | 0.382 |
| Group 2 0.3 mg/kg AD08821 | 0.681 | 0.235 | 0.655 | 0.419 |
| Group 3 1.0 mg/kg AD08821 | 0.291 | 0.063 | 0.251 | 0.164 |
| Group 4 3.0 mg/kg AD08821 | 0.136 | 0.051 | 0.084 | 0.076 |
| Group 5 0.3 mg/kg AD09350 | 0.507 | 0.066 | 0.685 | 0.130 |
| Group 6 1.0 mg/kg AD09350 | 0.250 | 0.090 | 0.211 | 0.093 |
| Group 7 3.0 mg/kg AD09350 | 0.098 | 0.036 | 0.044 | 0.019 |
| Group 8 0.3 mg/kg AD09352 | 0.861 | 0.180 | 0.948 | 0.401 |
| Group 9 1.0 mg/kg AD09352 | 0.295 | 0.142 | 0.203 | 0.100 |
| Group 10 3.0 mg/kg AD09352 | 0.166 | 0.043 | 0.004 | 0.005 |

| | Day 22 | |
|---|---|---|
| | Avg | Std Dev |
| Group ID | SEAP | (+/−) |
| Group 1 (Saline) | 1.000 | 0.514 |
| Group 2 0.3 mg/kg AD08821 | 0.511 | 0.302 |
| Group 3 1.0 mg/kg AD08821 | 0.168 | 0.103 |
| Group 4 3.0 mg/kg AD08821 | 0.047 | 0.024 |
| Group 5 0.3 mg/kg AD09350 | 0.426 | 0.083 |
| Group 6 1.0 mg/kg AD09350 | 0.105 | 0.073 |
| Group 7 3.0 mg/kg AD09350 | 0.026 | 0.014 |
| Group 8 0.3 mg/kg AD09352 | 0.660 | 0.103 |
| Group 9 1.0 mg/kg AD09352 | 0.154 | 0.082 |
| Group 10 3.0 mg/kg AD09352 | 0.024 | 0.006 |

[0381] Each of the MMP7 RNAi agents in each of the dosing groups (i.e., Groups 2 through 10) showed reduction in SEAP as compared to the saline control (Group 1) across all measured time points, which as described herein, indicates inhibition of MMP7 in the MMP7-SEAP mouse model.

### Example 15. In Vivo Testing of MMP7 RNAi Agents in MMP7-SEAP Mice

[0382] The MMP7-SEAP mouse model described in Example 2, above, was used. At day 1, each mouse was given a single subcutaneous injection of 200 μl per 20 g body weight containing either 3.0 mg/kg (mpk) of an MMP7 RNAi agent, 1.0 mpk of an MMP7 RNAi agent, 0.3 mpk of an MMP7 RNAi agent, or saline without an MMP7 RNAi agent to be used as a control, according to the following Table 36.

TABLE 36
MMP7 RNAi Agent and Dosing for Example 15.

| Group ID | Dosing Regimen |
|---|---|
| Group 1 (isotonic saline) | Single injection on day 1 |
| Group 2 0.3 mg/kg AD08808 | Single injection on day 1 |
| Group 3 1.0 mg/kg AD08808 | Single injection on day 1 |
| Group 4 3.0 mg/kg AD08808 | Single injection on day 1 |
| Group 5 0.3 mg/kg AD09332 | Single injection on day 1 |
| Group 6 1.0 mg/kg AD09332 | Single injection on day 1 |
| Group 7 3.0 mg/kg AD09332 | Single injection on day 1 |
| Group 8 0.3 mg/kg AD09333 | Single injection on day 1 |
| Group 9 1.0 mg/kg AD09333 | Single injection on day 1 |
| Group 10 3.0 mg/kg AD09333 | Single injection on day 1 |

[0383] Each of the MMP7 RNAi agents included N-acetyl-galactosamine targeting ligands conjugated to the 5′-terminal end of the sense strand, as shown in Tables 5 and 7B. The injections were performed between the skin and muscle (i. e. subcutaneous injections) into the loose skin over the neck and shoulder area. Four (4) mice in each group were tested (n=4). Serum was collected on day 8, day 15, day 22, and day 29, and SEAP expression levels were determined pursuant to the procedure set forth in Example 2, above. Data from the experiment are shown in the following Table 37, with Average SEAP reflecting the normalized average value of SEAP:

TABLE 37
Average SEAP normalized to pre-treatment and saline
control in MMP7-SEAP mice from Example 15.

| | Day 8 | | Day 15 | |
|---|---|---|---|---|
| | Avg | Std Dev | Avg | Std Dev |
| Group ID | SEAP | (+/−) | SEAP | (+/−) |
| Group 1 (Saline) | 1.000 | 0.334 | 1.000 | 0.473 |
| Group 2 0.3 mg/kg AD08808 | 0.679 | 0.506 | 0.503 | 0.164 |
| Group 3 1.0 mg/kg AD08808 | 0.365 | 0.134 | 0.316 | 0.158 |
| Group 4 3.0 mg/kg AD08808 | 0.116 | 0.069 | 0.099 | 0.084 |
| Group 5 0.3 mg/kg AD09332 | 0.482 | 0.124 | 0.337 | 0.264 |
| Group 6 1.0 mg/kg AD09332 | 0.342 | 0.177 | 0.244 | 0.091 |
| Group 7 3.0 mg/kg AD09332 | 0.139 | 0.100 | 0.066 | 0.075 |
| Group 8 0.3 mg/kg AD09333 | 0.562 | 0.377 | 0.502 | 0.250 |
| Group 9 1.0 mg/kg AD09333 | 0.305 | 0.108 | 0.191 | 0.055 |
| Group 10 3.0 mg/kg AD09333 | 0.125 | 0.020 | 0.037 | 0.020 |
| | Day 22 | | Day 29 | |
| | Avg | Std Dev | Avg | Std Dev |
| Group ID | SEAP | (+/−) | SEAP | (+/−) |
| Group 1 (Saline) | 1.000 | 0.310 | 1.000 | 0.619 |
| Group 2 0.3 mg/kg AD08808 | 1.407 | 2.130 | 0.907 | 0.778 |
| Group 3 1.0 mg/kg AD08808 | 0.308 | 0.131 | 0.333 | 0.270 |
| Group 4 3.0 mg/kg AD08808 | 0.095 | 0.062 | 0.127 | 0.083 |
| Group 5 0.3 mg/kg AD09332 | 1.652 | 2.697 | 0.471 | 0.259 |
| Group 6 1.0 mg/kg AD09332 | 0.298 | 0.121 | 0.275 | 0.313 |
| Group 7 3.0 mg/kg AD09332 | 0.065 | 0.052 | 0.070 | 0.045 |
| Group 8 0.3 mg/kg AD09333 | 0.635 | 0.240 | 0.687 | 0.321 |
| Group 9 1.0 mg/kg AD09333 | 0.236 | 0.129 | 0.289 | 0.219 |
| Group 10 3.0 mg/kg AD09333 | 0.075 | 0.052 | 0.061 | 0.039 |

[0384] Each of the MMP7 RNAi agents in each of the dosing groups, except for Groups 2 and 5 on day 22, showed reduction in SEAP as compared to the saline control (Group 1) across all measured time points, which as described herein, indicates inhibition of MMP7 in the MMP7-SEAP mouse model.

### Example 16. In Vivo Testing of MMP7 RNAi Agents in MMP7-SEAP Mice

[0385] The MMP7-SEAP mouse model described in Example 2, above, was used. At day 1, each mouse was given a single subcutaneous injection of 200 μl per 20 g body weight containing either 1.0 mg/kg (mpk) of an MMP7 RNAi agent, 0.5 mpk of an MMP7 RNAi agent, or saline without an MMP7 RNAi agent to be used as a control, according to the following Table 38.

TABLE 38
MMP7 RNAi Agent and Dosing for Example 16.

| Group ID | Dosing Regimen |
|---|---|
| Group 1 (isotonic saline) | Single injection on day 1 |
| Group 2 1.0 mg/kg AD08811 | Single injection on day 1 |
| Group 3 0.5 mg/kg AD08811 | Single injection on day 1 |
| Group 4 1.0 mg/kg AD08823 | Single injection on day 1 |
| Group 5 0.5 mg/kg AD08823 | Single injection on day 1 |
| Group 6 1.0 mg/kg AD09246 | Single injection on day 1 |
| Group 7 0.5 mg/kg AD09246 | Single injection on day 1 |
| Group 8 1.0 mg/kg AD09247 | Single injection on day 1 |
| Group 9 0.5 mg/kg AD09247 | Single injection on day 1 |

[0386] Each of the MMP7 RNAi agents included N-acetyl-galactosamine targeting ligands conjugated to the 5′-terminal end of the sense strand, as shown in Tables 5 and 7B. The injections were performed between the skin and muscle (i. e. subcutaneous injections) into the loose skin over the neck and shoulder area. Four (4) mice in each group were tested (n=4). Serum was collected on day 8, day 15, and day 22, and SEAP expression levels were determined pursuant to the procedure set forth in Example 2, above. Data from the experiment are shown in the following Table 39, with Average SEAP reflecting the normalized average value of SEAP:

TABLE 39
Average SEAP normalized to pre-treatment and saline
control in MMP7-SEAP mice from Example 16.

| | Day 8 | | Day 15 | |
|---|---|---|---|---|
| | Avg | Std Dev | Avg | Std Dev |
| Group ID | SEAP | (+/−) | SEAP | (+/−) |
| Group 1 (Saline) | 1.000 | 0.737 | 1.000 | 0.652 |
| Group 2 1.0 mg/kg AD08811 | 0.982 | 1.098 | 1.114 | 1.386 |
| Group 3 0.5 mg/kg AD08811 | 2.107 | 1.950 | 2.015 | 1.885 |
| Group 4 1.0 mg/kg AD08823 | 0.831 | 0.728 | 0.750 | 0.643 |
| Group 5 0.5 mg/kg AD08823 | 0.818 | 0.371 | 0.802 | 0.459 |
| Group 6 1.0 mg/kg AD09246 | 0.347 | 0.223 | 0.257 | 0.173 |
| Group 7 0.5 mg/kg AD09246 | 0.592 | 0.649 | 0.535 | 0.640 |
| Group 8 1.0 mg/kg AD09247 | 0.240 | 0.265 | 0.214 | 0.225 |
| Group 9 0.5 mg/kg AD09247 | 1.108 | 0.878 | 2.426 | 1.497 |

| | Day 22 | |
|---|---|---|
| | Avg | Std Dev |
| Group ID | SEAP | (+/−) |
| Group 1 (Saline) | 1.000 | 0.663 |
| Group 2 1.0 mg/kg AD08811 | 1.699 | 2.201 |
| Group 3 0.5 mg/kg AD08811 | 3.642 | 3.831 |
| Group 4 1.0 mg/kg AD08823 | 0.918 | 0.907 |
| Group 5 0.5 mg/kg AD08823 | 0.966 | 0.480 |
| Group 6 1.0 mg/kg AD09246 | 0.441 | 0.439 |
| Group 7 0.5 mg/kg AD09246 | 0.795 | 0.983 |
| Group 8 1.0 mg/kg AD09247 | 0.285 | 0.300 |
| Group 9 0.5 mg/kg AD09247 | 0.868 | 0.630 |

[0387] Each of the MMP7 RNAi agents in each of the dosing groups 4 through 8 showed reduction in SEAP as compared to the saline control (Group 1) across all measured time points, which as described herein, indicates inhibition of MMP7 in the MMP7-SEAP mouse model.

### Example 17. In Vivo Testing of MMP7 RNAi Agents in MMP7-SEAP Mice

[0388] The MMP7-SEAP mouse model described in Example 2, above, was used. At day 1, each mouse was given a single subcutaneous injection of 200 μl per 20 g body weight containing either 1.0 mpk of an MMP7 RNAi agent, or saline without an MMP7 RNAi agent to be used as a control, according to the following Table 40.

TABLE 40
MMP7 RNAi Agent and Dosing for Example 17.

| Group ID | Dosing Regimen |
|---|---|
| Group 1 (isotonic saline) | Single injection on day 1 |
| Group 2 1.0 mg/kg AD08821 | Single injection on day 1 |
| Group 3 1.0 mg/kg AD09890 | Single injection on day 1 |
| Group 4 1.0 mg/kg AD09891 | Single injection on day 1 |
| Group 5 1.0 mg/kg AD09352 | Single injection on day 1 |
| Group 6 1.0 mg/kg AD09908 | Single injection on day 1 |
| Group 7 1.0 mg/kg AD09909 | Single injection on day 1 |
| Group 8 1.0 mg/kg AD09330 | Single injection on day 1 |
| Group 9 1.0 mg/kg AD09892 | Single injection on day 1 |
| Group 10 1.0 mg/kg AD09332 | Single injection on day 1 |
| Group 11 1.0 mg/kg AD09894 | Single injection on day 1 |
| Group 12 1.0 mg/kg AD09895 | Single injection on day 1 |
| Group 13 1.0 mg/kg AD08801 | Single injection on day 1 |
| Group 14 1.0 mg/kg AD09896 | Single injection on day 1 |
| Group 15 1.0 mg/kg AD09897 | Single injection on day 1 |
| Group 16 1.0 mg/kg AD09898 | Single injection on day 1 |
| Group 17 1.0 mg/kg AD09899 | Single injection on day 1 |
| Group 18 1.0 mg/kg AD08811 | Single injection on day 1 |
| Group 19 1.0 mg/kg AD08823 | Single injection on day 1 |

[0389] Each of the MMP7 RNAi agents included N-acetyl-galactosamine targeting ligands conjugated to the 5′-terminal end of the sense strand, as shown in Tables 5 and 7B. The injections were performed between the skin and muscle (i. e. subcutaneous injections) into the loose skin over the neck and shoulder area. Four (4) mice in each group were tested (n=4). Serum was collected on day 8, day 15, day 22, and day 29, and SEAP expression levels were determined pursuant to the procedure set forth in Example 2, above. Data from the experiment are shown in the following Table 41, with Average SEAP reflecting the normalized average value of SEAP:

TABLE 41
Average SEAP normalized to pre-treatment and saline control
in MMP7-SEAP mice from Example 17.

| | Day 8 | | Day 15 | |
|---|---|---|---|---|
| | Avg | Std Dev | Avg | Std Dev |
| Group ID | SEAP | (+/−) | SEAP | (+/−) |
| Group 1 (Saline) | 1.000 | 0.429 | 1.000 | 0.282 |
| Group 2 1.0 mg/kg AD08821 | 0.204 | 0.056 | 0.201 | 0.080 |
| Group 3 1.0 mg/kg AD09890 | 0.179 | 0.120 | 0.204 | 0.117 |
| Group 4 1.0 mg/kg AD09891 | 0.142 | 0.062 | 0.149 | 0.088 |
| Group 5 1.0 mg/kg AD09352 | 0.178 | 0.069 | 0.185 | 0.105 |
| Group 6 1.0 mg/kg AD09908 | 0.211 | 0.070 | 0.148 | 0.062 |
| Group 7 1.0 mg/kg AD09909 | 0.162 | 0.068 | 0.096 | 0.062 |
| Group 8 1.0 mg/kg AD09330 | 0.445 | 0.199 | 0.558 | 0.290 |
| Group 9 1.0 mg/kg AD09892 | 0.295 | 0.130 | 0.480 | 0.263 |
| Group 10 1.0 mg/kg AD09332 | 0.318 | 0.135 | 0.273 | 0.142 |
| Group 11 1.0 mg/kg AD09894 | 0.218 | 0.106 | 0.190 | 0.127 |
| Group 12 1.0 mg/kg AD09895 | 0.120 | 0.035 | 0.127 | 0.063 |
| Group 13 1.0 mg/kg AD08801 | 0.387 | 0.037 | 0.533 | 0.206 |
| Group 14 1.0 mg/kg AD09896 | 0.414 | 0.162 | 0.648 | 0.330 |
| Group 15 1.0 mg/kg AD09897 | 0.682 | 0.497 | 0.740 | 0.487 |
| Group 16 1.0 mg/kg AD09898 | 0.559 | 0.196 | 0.746 | 0.256 |
| Group 17 1.0 mg/kg AD09899 | 0.316 | 0.069 | 0.415 | 0.191 |
| Group 18 1.0 mg/kg AD08811 | 0.270 | 0.062 | 0.367 | 0.054 |
| Group 19 1.0 mg/kg AD08823 | 0.213 | 0.057 | 0.291 | 0.079 |
| | Day 22 | | Day 29 | |
| | Avg | Std Dev | Avg | Std Dev |
| Group ID | SEAP | (+/−) | SEAP | (+/−) |
| Group 1 (Saline) | 1.000 | 0.354 | 1.000 | 0.137 |
| Group 2 1.0 mg/kg AD08821 | 0.192 | 0.102 | 0.244 | 0.174 |
| Group 3 1.0 mg/kg AD09890 | 0.212 | 0.107 | 0.345 | 0.218 |
| Group 4 1.0 mg/kg AD09891 | 0.148 | 0.092 | 0.149 | 0.133 |
| Group 5 1.0 mg/kg AD09352 | 0.165 | 0.089 | 0.299 | 0.201 |
| Group 6 1.0 mg/kg AD09908 | 0.118 | 0.055 | 0.184 | 0.108 |
| Group 7 1.0 mg/kg AD09909 | 0.152 | 0.110 | 0.225 | 0.172 |
| Group 8 1.0 mg/kg AD09330 | 0.552 | 0.273 | 0.722 | 0.362 |
| Group 9 1.0 mg/kg AD09892 | 0.477 | 0.257 | 0.851 | 0.596 |
| Group 10 1.0 mg/kg AD09332 | 0.251 | 0.148 | 0.461 | 0.322 |
| Group 11 1.0 mg/kg AD09894 | 0.214 | 0.156 | 0.276 | 0.243 |
| Group 12 1.0 mg/kg AD09895 | 0.122 | 0.048 | 0.154 | 0.067 |
| Group 13 1.0 mg/kg AD08801 | 0.423 | 0.060 | 0.555 | 0.107 |
| Group 14 1.0 mg/kg AD09896 | 0.667 | 0.280 | 0.762 | 0.393 |
| Group 15 1.0 mg/kg AD09897 | 0.574 | 0.336 | 0.941 | 0.413 |
| Group 16 1.0 mg/kg AD09898 | 0.795 | 0.460 | 0.952 | 0.381 |
| Group 17 1.0 mg/kg AD09899 | 0.437 | 0.230 | 0.487 | 0.290 |
| Group 18 1.0 mg/kg AD08811 | 0.381 | 0.067 | 0.610 | 0.196 |
| Group 19 1.0 mg/kg AD08823 | 0.158 | 0.049 | 0.241 | 0.051 |

[0390] Each of the MMP7 RNAi agents in each of the dosing groups (i.e., Groups 2 through 19) showed reduction in SEAP as compared to the saline control (Group 1) across all measured time points, which as described herein, indicates inhibition of MMP7 in the MMP7-SEAP mouse model.

### Example 18. In Vivo Testing of MMP7 RNAi Agents in MMP7-SEAP Mice

[0391] The MMP7-SEAP mouse model described in Example 2, above, was used. At day 1, each mouse was given a single subcutaneous injection of 200 μl per 20 g body weight containing either 1.0 mpk of an MMP7 RNAi agent, or saline without an MMP7 RNAi agent to be used as a control, according to the following Table 42.

TABLE 42
MMP7 RNAi Agent and Dosing for Example 18.

| Group ID | Dosing Regimen |
|---|---|
| Group 1 (isotonic saline) | Single injection on day 1 |
| Group 2 1.0 mg/kg AD08811 | Single injection on day 1 |
| Group 3 1.0 mg/kg AD09354 | Single injection on day 1 |
| Group 4 1.0 mg/kg AD09356 | Single injection on day 1 |
| Group 5 1.0 mg/kg AD09357 | Single injection on day 1 |
| Group 6 1.0 mg/kg AD09358 | Single injection on day 1 |
| Group 7 1.0 mg/kg AD09900 | Single injection on day 1 |
| Group 8 1.0 mg/kg AD09901 | Single injection on day 1 |
| Group 9 1.0 mg/kg AD09902 | Single injection on day 1 |
| Group 10 1.0 mg/kg AD09903 | Single injection on day 1 |

[0392] Each of the MMP7 RNAi agents included N-acetyl-galactosamine targeting ligands conjugated to the 5′-terminal end of the sense strand, as shown in Tables 5 and 7B. The injections were performed between the skin and muscle (i.e. subcutaneous injections) into the loose skin over the neck and shoulder area. Four (4) mice in each group were tested (n=4). Serum was collected on day 8, day 15, day 22, and day 29, and SEAP expression levels were determined pursuant to the procedure set forth in Example 2, above. Data from the experiment are shown in the following Table 43, with Average SEAP reflecting the normalized average value of SEAP.

TABLE 43
Average SEAP normalized to pre-treatment and saline control
in MMP7-SEAP mice from Example 18.

| | Day 8 | | Day 15 | |
|---|---|---|---|---|
| | Avg | Std Dev | Avg | Std Dev |
| Group ID | SEAP | (+/−) | SEAP | (+/−) |
| Group 1 (Saline) | 1.000 | 0.177 | 1.000 | 0.343 |
| Group 2 1.0 mg/kg AD08811 | 0.322 | 0.148 | 0.341 | 0.274 |
| Group 3 1.0 mg/kg AD09354 | 0.508 | 0.197 | 0.411 | 0.144 |
| Group 4 1.0 mg/kg AD09356 | 0.561 | 0.222 | 0.528 | 0.171 |
| Group 5 1.0 mg/kg AD09357 | 0.414 | 0.150 | 0.335 | 0.167 |
| Group 6 1.0 mg/kg AD09358 | 0.298 | 0.029 | 0.207 | 0.093 |
| Group 7 1.0 mg/kg AD09900 | 0.356 | 0.208 | 0.111 | 0.096 |
| Group 8 1.0 mg/kg AD09901 | 0.581 | 0.053 | 0.360 | 0.077 |
| Group 9 1.0 mg/kg AD09902 | 0.404 | 0.242 | 0.273 | 0.174 |
| Group 10 1.0 mg/kg AD09903 | 0.492 | 0.221 | 0.317 | 0.194 |
| | Day 22 | | Day 29 | |
| | Avg | Std Dev | Avg | Std Dev |
| Group ID | SEAP | (+/−) | SEAP | (+/−) |
| Group 1 (Saline) | 1.000 | 0.356 | 1.000 | 0.328 |
| Group 2 1.0 mg/kg AD08811 | 0.493 | 0.227 | 0.623 | 0.316 |
| Group 3 1.0 mg/kg AD09354 | 0.478 | 0.244 | 0.535 | 0.241 |
| Group 4 1.0 mg/kg AD09356 | 0.654 | 0.341 | 0.622 | 0.304 |
| Group 5 1.0 mg/kg AD09357 | 0.999 | 0.550 | 0.429 | 0.295 |
| Group 6 1.0 mg/kg AD09358 | 0.398 | 0.475 | 0.241 | 0.108 |
| Group 7 1.0 mg/kg AD09900 | 0.195 | 0.155 | 0.273 | 0.213 |
| Group 8 1.0 mg/kg AD09901 | 0.358 | 0.146 | 0.354 | 0.220 |
| Group 9 1.0 mg/kg AD09902 | 0.318 | 0.248 | 0.273 | 0.149 |
| Group 10 1.0 mg/kg AD09903 | 0.375 | 0.241 | 0.399 | 0.230 |

[0393] Each of the MMP7 RNAi agents in each of the dosing groups (i.e., Groups 2 through 10) showed reduction in SEAP as compared to the saline control (Group 1) across all measured time points, which as described herein, indicates inhibition of MMP7 in the MMP7-SEAP mouse model.

### Example 19. In Vivo Testing of MMP7 RNAi Agents in MMP7-SEAP Mice

[0394] The MMP7-SEAP mouse model described in Example 2, above, was used. At day 1, each mouse was given a single subcutaneous injection of 200 μl per 20 g body weight containing either 0.75 mpk of an MMP7 RNAi agent, or saline without an MMP7 RNAi agent to be used as a control, according to the following Table 44.

TABLE 44
MMP7 RNAi Agent and Dosing for Example 19.

| Group ID | Dosing Regimen |
|---|---|
| Group 1 (isotonic saline) | Single injection on day 1 |
| Group 2 0.75 mg/kg AD08811 | Single injection on day 1 |
| Group 3 0.75 mg/kg AD10284 | Single injection on day 1 |
| Group 4 0.75 mg/kg AD09900 | Single injection on day 1 |
| Group 5 0.75 mg/kg AD10285 | Single injection on day 1 |
| Group 6 0.75 mg/kg AD09358 | Single injection on day 1 |
| Group 7 0.75 mg/kg AD10286 | Single injection on day 1 |
| Group 8 0.75 mg/kg AD10287 | Single injection on day 1 |
| Group 9 0.75 mg/kg AD10288 | Single injection on day 1 |
| Group 10 | Single injection on day 1 |
| 0.75 mg/kg AD10290 | |
| Group 11 | Single injection on day 1 |
| 0.75 mg/kg AD10291 | |
| Group 12 | Single injection on day 1 |
| 0.75 mg/kg AD10292 | |

[0395] Each of the MMP7 RNAi agents included N-acetyl-galactosamine targeting ligands conjugated to the 5′-terminal end of the sense strand, as shown in Tables 5 and 7B. The injections were performed between the skin and muscle (i.e. subcutaneous injections) into the loose skin over the neck and shoulder area. Four (4) mice in each group were tested (n=4). Serum was collected on day 8, day 15, day 22, and day 29, and SEAP expression levels were determined pursuant to the procedure set forth in Example 2, above. Data from the experiment are shown in the following Table 45, with Average SEAP reflecting the normalized average value of SEAP:

TABLE 45
Average SEAP normalized to pre-treatment and saline control
in MMP7-SEAP mice from Example 19.

| | Day 8 | | Day 15 | |
|---|---|---|---|---|
| | Avg | Std Dev | Avg | Std Dev |
| Group ID | SEAP | (+/−) | SEAP | (+/−) |
| Group 1 (Saline) | 1.000 | 0.149 | 1.000 | 0.109 |
| Group 2 0.75 mg/kg AD08811 | 0.439 | 0.147 | 0.447 | 0.150 |
| Group 3 0.75 mg/kg AD10284 | 0.362 | 0.124 | 0.517 | 0.229 |
| Group 4 0.75 mg/kg AD09900 | 0.473 | 0.107 | 0.363 | 0.204 |
| Group 5 0.75 mg/kg AD10285 | 0.354 | 0.117 | 0.298 | 0.143 |
| Group 6 0.75 mg/kg AD09358 | 0.573 | 0.280 | 0.315 | 0.155 |
| Group 7 0.75 mg/kg AD10286 | 0.392 | 0.198 | 0.257 | 0.213 |
| Group 8 0.75 mg/kg AD10287 | 0.448 | 0.166 | 0.259 | 0.083 |
| Group 9 0.75 mg/kg AD10288 | 0.304 | 0.126 | 0.196 | 0.086 |
| Group 10 | 0.360 | 0.138 | 0.166 | 0.074 |
| 0.75 mg/kg AD10290 | | | | |
| Group 11 | 0.354 | 0.188 | 0.273 | 0.144 |
| 0.75 mg/kg AD10291 | | | | |
| Group 12 | 0.914 | 1.247 | 0.661 | 0.865 |
| 0.75 mg/kg AD10292 | | | | |
| | Day 22 | | Day 29 | |
| | Avg | Std Dev | Avg | Std Dev |
| Group ID | SEAP | (+/−) | SEAP | (+/−) |
| Group 1 (Saline) | 1.000 | 0.273 | 1.000 | 0.300 |
| Group 2 0.75 mg/kg AD08811 | 0.445 | 0.083 | 0.357 | 0.171 |
| Group 3 0.75 mg/kg AD10284 | 0.448 | 0.173 | 0.203 | 0.192 |
| Group 4 0.75 mg/kg AD09900 | 0.330 | 0.133 | 0.263 | 0.110 |
| Group 5 0.75 mg/kg AD10285 | 0.284 | 0.086 | 0.207 | 0.095 |
| Group 6 0.75 mg/kg AD09358 | 0.512 | 0.266 | 0.403 | 0.188 |
| Group 7 0.75 mg/kg AD10286 | 0.313 | 0.133 | 0.250 | 0.178 |
| Group 8 0.75 mg/kg AD10287 | 0.310 | 0.065 | 0.224 | 0.026 |
| Group 9 0.75 mg/kg AD10288 | 0.214 | 0.183 | 0.203 | 0.161 |
| Group 10 | 0.158 | 0.073 | 0.111 | 0.059 |
| 0.75 mg/kg AD10290 | | | | |
| Group 11 | 0.274 | 0.108 | 0.331 | 0.193 |
| 0.75 mg/kg AD10291 | | | | |
| Group 12 | 0.676 | 0.892 | 0.702 | 0.726 |
| 0.75 mg/kg AD10292 | | | | |

[0396] Each of the MMP7 RNAi agents in each of the dosing groups (i.e., Groups 2 through 12) showed reduction in SEAP as compared to the saline control (Group 1) across all measured time points, which as described herein, indicates inhibition of MMP7 in the MMP7-SEAP mouse model.

### Example 20. In Vivo Testing of MMP7 RNAi Agents in MMP7-SEAP Mice

[0397] The MMP7-SEAP mouse model described in Example 2, above, was used. At day 1, each mouse was given a single subcutaneous injection of 200 μl per 20 g body weight containing either 1.0 mg/kg (mpk) of an MMP7 RNAi agent, 0.5 mpk of an MMP7 RNAi agent, or saline without an MMP7 RNAi agent to be used as a control, according to the following Table 46.

TABLE 46
MMP7 RNAi Agent and Dosing for Example 20.

| Group ID | Dosing Regimen |
|---|---|
| Group 1 (isotonic saline) | Single injection on day 1 |
| Group 2 1.0 mg/kg | Single injection on day 1 |
| AD09358 | |
| Group 3 0.5 mg/kg | Single injection on day 1 |
| AD09358 | |
| Group 4 1.0 mg/kg | Single injection on day 1 |
| AD10288 | |
| Group 5 0.5 mg/kg | Single injection on day 1 |
| AD10288 | |
| Group 6 1.0 mg/kg | Single injection on day 1 |
| AD10290 | |
| Group 7 0.5 mg/kg | Single injection on day 1 |
| AD10290 | |
| Group 8 1.0 mg/kg | Single injection on day 1 |
| AD09909 | |
| Group 9 0.5 mg/kg | Single injection on day 1 |
| AD09909 | |

[0398] Each of the MMP7 RNAi agents included N-acetyl-galactosamine targeting ligands conjugated to the 5′-terminal end of the sense strand, as shown in Tables 5 and 7B. The injections were performed between the skin and muscle (i.e. subcutaneous injections) into the loose skin over the neck and shoulder area. Four (4) mice in each group were tested (n=4). Serum was collected on day 8, day 15, and day 22, and SEAP expression levels were determined pursuant to the procedure set forth in Example 2, above. Data from the experiment are shown in the following Table 47, with Average SEAP reflecting the normalized average value of SEAP.

TABLE 47
Average SEAP normalized to pre-treatment and saline control in
MMP7-SEAP mice from Example 20.

| | Day 8 | | Day 15 | |
|---|---|---|---|---|
| | Avg | Std Dev | Avg | Std Dev |
| Group ID | SEAP | (+/−) | SEAP | (+/−) |
| Group 1 (Saline) | 1.000 | 0.087 | 1.000 | 0.128 |
| Group 2 1.0 mg/kg AD09358 | 0.494 | 0.178 | 0.479 | 0.264 |
| Group 3 0.5 mg/kg AD09358 | 0.577 | 0.182 | 0.659 | 0.287 |
| Group 4 1.0 mg/kg AD10288 | 0.333 | 0.144 | 0.307 | 0.242 |
| Group 5 0.5 mg/kg AD10288 | 0.510 | 0.218 | 0.569 | 0.252 |
| Group 6 1.0 mg/kg AD10290 | 0.273 | 0.069 | 0.303 | 0.226 |
| Group 7 0.5 mg/kg AD10290 | 0.571 | 0.303 | 0.447 | 0.351 |
| Group 8 1.0 mg/kg AD09909 | 0.129 | 0.075 | 0.054 | 0.019 |
| Group 9 0.5 mg/kg AD09909 | 0.290 | 0.129 | 0.164 | 0.093 |

| | Day 22 | |
|---|---|---|
| Group ID | Avg SEAP | Std Dev (+/−) |
| Group 1 (Saline) | 1.000 | 0.205 |
| Group 2 1.0 mg/kg AD09358 | 0.523 | 0.296 |
| Group 3 0.5 mg/kg AD09358 | 0.963 | 0.452 |
| Group 4 1.0 mg/kg AD10288 | 0.403 | 0.392 |
| Group 5 0.5 mg/kg AD10288 | 0.471 | 0.213 |
| Group 6 1.0 mg/kg AD10290 | 0.301 | 0.155 |
| Group 7 0.5 mg/kg AD10290 | 0.517 | 0.564 |
| Group 8 1.0 mg/kg AD09909 | 0.051 | 0.011 |
| Group 9 0.5 mg/kg AD09909 | 0.198 | 0.152 |

[0399] Each of the MMP7 RNAi agents in all of the dosing groups (i.e., Groups 2 through 9) showed reduction in SEAP as compared to the saline control (Group 1) across all measured time points, which as described herein, indicates inhibition of MMP7 in the MMP7-SEAP mouse model.

### Example 21. In Vivo Inhaled Aerosolized Administration of MMP7 RNAi Agents in Cynomolgus Monkeys

[0400] On study day 1, male cynomolgus monkeys were administered a single deposited dose level of 1 mg/kg of the MMP7 RNAi agent AC001514, AC001651, or AC001516 (see Tables 8, 6, and 3 for structural information.). Twelve anesthetized male non-human primates (NHPs) were exposed to either aerosolized Isotonic Saline (control article), AC001514, AC001516 or AC001651 (test articles) using an endotracheal inhalation delivery system. All animals received a single inhalation exposure. In this study, aerosols generated using Aeroneb Solo nebulizers were delivered using a Harvard ventilation pump. The exposure duration for each of these tests was 8 minutes. Dose exposures in vivo were estimated by collecting aerosol on a filter at the end of the endotracheal tube in a separate in vitro test. One filter test was performed before and after each in vivo exposure. The filters were analyzed by gravimetric and chemical methods. A UV spectrometric method using SpectraMax i3x was deployed for the chemical analysis of the filters to determine the amount of test article administered over the course of the exposure.

[0401] The average deposited doses of saline control, AC001514, AC001516 and AC001651 were 0.0, 1.04, 1.12 and 1.21 mg/kg, respectively. Target deposited doses for each of the three test articles for this study were 1.0 mg/kg. The MMP7 RNAi agent was conjugated to a tridentate small molecule αvβ6 epithelial cell targeting ligand (Tri-SM6.1, see Table 11) at the 5′ terminal end of the sense strand, formulated in isotonic saline. The dosing groups were as follows:

TABLE 48
MMP7 RNAi Agent and Dosing for Example 21.

| | AC Duplex |
|---|---|
| Group ID | Number |
| Group 1 (isotonic saline) | N/A |
| Group 2 (1.0 mg/kg target deposited dose | AC001514 |
| Tri-SM6.1-αvß6-AD09667) | |
| Group 3 (1.0 mg/kg target deposited dose | AC001651 |
| Tri-SM6.1-αvß6-AD09887) | |
| Group 4 (1.0 mg/kg target deposited dose | AC001516 |
| Tri-SM6.1-αvß6-AD09669) | |

[0402] Three (3) monkeys were dosed per group. Bronchoalveolar lavage (BAL) and endobronchial brushings were collected at baseline and two weeks after a single inhalation exposure. All animals were euthanized just after blood and BAL sample collection to collect tissue of interest. Monkeys were sacrificed on study day 15, and total RNA was isolated from lung samples following collection and homogenization. The data in Table 49 shows mRNA expression sampled from the right cranial lobe, the right middle lobe, and the right caudal lobe. Cynomolgus monkey MMP7 mRNA expression was quantitated by probe-based quantitative PCR, normalized to Cynomolgus monkey ARL1 expression, and expressed as fraction of vehicle control group (geometric mean, +/−95% confidence interval).

TABLE 49
Average Relative Cynomolgus Monkey MMP7 mRNA Expression at
Sacrifice in Example 21.

| Hilar Region | | | Middle Region | | | Peripheral Region | | |
|---|---|---|---|---|---|---|---|---|
| | Low | High | | Low | High | | Low | High |
| Average | (error) | (error) | Average | (error) | (error) | Average | (error) | (error) |

Right Cranial Lobe

| | | | | | | | | | |
|---|---|---|---|---|---|---|---|---|---|
| Group 1 | 1.000 | 0.354 | 0.547 | 1.000 | 0.438 | 0.780 | 1.000 | 0.412 | 0.699 |
| (isotonic | | | | | | | | | |
| saline) | | | | | | | | | |
| Group 2 | 0.778 | 0.379 | 0.740 | 0.264 | 0.180 | 0.562 | 0.412 | 0.161 | 0.265 |
| (1.0 mg/kg | | | | | | | | | |
| AC001514) | | | | | | | | | |
| Group 3 | 0.115 | 0.049 | 0.085 | 0.202 | 0.093 | 0.173 | 0.461 | 0.278 | 0.703 |
| (1.0 mg/kg | | | | | | | | | |
| AC001651) | | | | | | | | | |
| Group 4 | 0.181 | 0.098 | 0.215 | 0.173 | 0.112 | 0.321 | 0.466 | 0.294 | 0.796 |
| (1.0 mg/kg | | | | | | | | | |
| AC001516) | | | | | | | | | |

Right Middle Lobe

| | | | | | | | | | |
|---|---|---|---|---|---|---|---|---|---|
| Group 1 | 1.000 | 0.227 | 0.293 | 1.000 | 0.466 | 0.874 | 1.000 | 0.366 | 0.577 |
| (isotonic | | | | | | | | | |
| saline) | | | | | | | | | |
| Group 2 | 0.537 | 0.081 | 0.096 | 0.362 | 0.172 | 0.328 | 0.548 | 0.163 | 0.231 |
| (1.0 mg/kg | | | | | | | | | |
| AC001514) | | | | | | | | | |
| Group 3 | 0.358 | 0.078 | 0.099 | 0.071 | 0.016 | 0.020 | 0.188 | 0.053 | 0.074 |
| (1.0 mg/kg | | | | | | | | | |
| AC001651) | | | | | | | | | |
| Group 4 | 0.265 | 0.158 | 0.392 | 0.574 | 0.288 | 0.579 | 0.682 | 0.372 | 0.817 |
| (1.0 mg/kg | | | | | | | | | |
| AC001516) | | | | | | | | | |

Right Caudal Lobe

| | | | | | | | | | |
|---|---|---|---|---|---|---|---|---|---|
| Group 1 | 1.000 | 0.459 | 0.848 | 1.000 | 0.425 | 0.739 | 1.000 | 0.359 | 0.561 |
| (isotonic | | | | | | | | | |
| saline) | | | | | | | | | |
| Group 2 | 1.180 | 0.184 | 0.219 | 0.565 | 0.043 | 0.047 | 0.583 | 0.136 | 0.177 |
| (1.0 mg/kg | | | | | | | | | |
| AC001514) | | | | | | | | | |
| Group 3 | 0.259 | 0.081 | 0.118 | 0.137 | 0.071 | 0.147 | 0.149 | 0.044 | 0.062 |
| (1.0 mg/kg | | | | | | | | | |
| AC001651) | | | | | | | | | |
| Group 4 | 0.580 | 0.347 | 0.863 | 0.843 | 0.358 | 0.622 | 0.664 | 0.416 | 1.111 |
| (1.0 mg/kg | | | | | | | | | |
| AC001516) | | | | | | | | | |

[0403] As shown in the data in Table 49 above, RNAi agents AC001514, AC001651 and AC001516 showed substantial inhibition across various regions and lobes of the lung demonstrating the ability to robustly silence MMP7 expression in non-human primates.

[0404] Cynomolgus monkey MMP7 protein expression in the lung tissues and BAL was quantitated by Western blot using iBright imaging system (Thermofisher), shown in the following Table 50.

TABLE 50
Average Relative Cynomolgus Monkey MMP7 Protein Expression
at Sacrifice in Example 21.

| | MMP7 Protein | | | |
|---|---|---|---|---|
| | expression in | | | |
| | lung tissue | | | |
| | (Right | | MMP7 protein | |
| | Accessory | | expression | |
| | Lobe) | | in the BAL | |
| | | Std | | Std |
| | Avg | Dev | Avg | Dev |
| Group ID | MMP7 | (+/−) | MMP7 | (+/−) |
| Group 1 (isotonic saline) | 1.00 | 0.519 | 1.00 | 0.613 |
| Group 2 (1.0 mg/kg AC001514) | N/A | | N/A | |
| Group 3 (1.0 mg/kg AC001651) | 0.181 | 0.031 | 0.171 | 0.145 |

| | | |
|---|---|---|
| Group 4 (1.0 mg/kg AC001516) | N/A | N/A |

[0405] As shown in the data in Table 50 above, RNAi agent AC001651 silences MMP7 expression, showing over 80% reduction in protein expression in both lung tissues and BAL in non-human primates.

### Example 22. AAV6.2FF-CAG-hMMP7.UTRs AAV Mouse Model

[0406] The following procedure was used to evaluate MMP7 RNAi agents in an AAV mouse model. To evaluate certain MMP7 RNAi agents, a AAV6.2FF-CAG-hMMP7.UTRs (Adeno-associated virus) mouse model was used. The transgenic sequence included human MMP7 CDS with 3′UTR. Six- to eight-week-old female C57BL/6 mice were transduced with human MMP7 using AAV with serotype 6.2FF. Mice were intratracheally administered at least 10 days prior to mutiple intracheal administration of MMP7 RNAi agents or control. Two types of AAV, AAV6.2FF-CAG-hMMP7.UTRs and AAV6.2FF-CAG-eGFP were used. The genome of the AAV6.2FF-CAG-hMMP7.UTRs construct contains the 17-1119 region of the human MMP7 cDNA sequence (GenBank NM_002423.5). AAV6.2FF-CAG-eGFP was co-dosed with AAV6.2FF-CAG-hMMP7.UTRs. eGFP was used as endogenous control to normalize human MMP7 mRNA expression by qPCR. 2E10 to 4E10 GC of the respective virus mixed in PBS in a total volume of 50 μL was intratracheally (IT) delivered into mice to create AAV-hMMP7 model mice. Lung tissues and bronchoalveolar lavage fluid (BALF) were collected 2-3 weeks after the administration of RNAi agents.

[0407] The human MMP7 mRNA and protein level expressions were measured in the lung tissues by qPCR and Western Blot. Human MMP7 protein expression in bronchoalveolar lavage fluid (BALF) was measured by ELISA.

[0408] At day 1 and Day 3, each mouse was given an intratracheal (IT) administration of 50 μL AAV solutions containing 1 GC (genome copy) of AAV6.2FF-CAG-eGFP and 2 GC of AAV6.2FF-CAG-hMMP7.UTRs in PBS or vehicle control (PBS). At Day 13, 15, and 17, each mouse was given intratracheal administration of 50 μL of different dose levels of MMP7 RNAi agents formulated in isotonic saline, or vehicle control (isotonic saline with no RNAi agent), according to the following Table 51.

TABLE 51
Targeted Positions and Dosing Groups of Example 22.

| | Targeted MMP7 Gene | | | | |
|---|---|---|---|---|---|
| | Position (within SEQ ID NO: | | RNAi Agent | | Dosing |
| Group | 1, GenBank NM_002423.5) | AAV dose | and Dose | | Regimen |
| 1 | N/A | PBS | Saline | | Mutiple IT |
| | | | (no RNAi | | doses of PBS |
| | | | agent) | | on Day 1, 3; |
| | | | | | Mutiple IT |
| | | | | | doses of |
| | | | | | saline on |
| | | | | | day 13, 15, 17 |
| 2 | N/A | 1GC of AAV6.2FF- | Saline | | Mutiple IT |
| | | CAG-eGFP and 2GC of | (no RNAi | | doses of AAV |
| | | AAV6.2FF-CAG- | agent) | | on Day 1, 3; |
| | | hMMP7.UTRs | | | Mutiple |
| | | | | | IT doses of |
| | | | | | saline on |
| | | | | | day 13, 15, 17 |
| 3 | 971 | 1GC of AAV6.2FF- | 3 | mg/kg | Mutiple IT |
| | | CAG-eGFP and 2GC of | AC001651 | | doses of AAV |
| | | AAV6.2FF-CAG- | | | on Day 1, 3; |
| | | hMMP7.UTRs | | | Mutiple IT |
| | | | | | doses of |
| | | | | | RNAi agent on |
| | | | | | day 13, 15, 17 |
| 4 | 971 | 1GC of AAV6.2FF- | 1.5 | mg/kg | Mutiple IT |
| | | CAG-eGFP and 2GC of | AC001651 | | doses of AAV |
| | | AAV6.2FF-CAG- | | | on Day 1, 3; |
| | | hMMP7.UTRs | | | Mutiple IT |
| | | | | | doses of RNAi |
| | | | | | agent on day |
| | | | | | 13, 15, 17 |
| 5 | 971 | 1GC of AAV6.2FF- | 0.75 | mg/kg | Mutiple IT |
| | | CAG-eGFP and 2GC of | AC001651 | | doses of AAV |
| | | AAV6.2FF-CAG- | | | on Day 1, 3; |
| | | hMMP7.UTRs | | | Mutiple IT |
| | | | | | doses of RNAi |
| | | | | | agent on day |
| | | | | | 13, 15, 17 |
| 6 | 735 | 1GC of AAV6.2FF- | 3 | mg/kg | Mutiple IT |
| | | CAG-eGFP and 2GC of | AC002023 | | doses of AAV |
| | | AAV6.2FF-CAG- | | | on Day 1, 3; |
| | | hMMP7.UTRs | | | Mutiple IT |
| | | | | | doses of RNAi |
| | | | | | agent on day |
| | | | | | 13, 15, 17 |
| 7 | 735 | 1GC of AAV6.2FF- | 1.5 | mg/kg | Mutiple IT |
| | | CAG-eGFP and 2GC of | AC002023 | | doses of AAV |
| | | AAV6.2FF-CAG- | | | on Day 1, 3; |
| | | hMMP7.UTRs | | | Mutiple IT |
| | | | | | doses of RNAi |
| | | | | | agent on day |
| | | | | | 13, 15, 17 |
| 8 | 735 | 1GC of AAV6.2FF- | 0.75 | mg/kg | Mutiple IT |

| | | |
|---|---|---|
| CAG-eGFP and 2GC of | AC002023 | doses of AAV |
| AAV6.2FF-CAG- | | on Day 1, 3; |
| hMMP7.UTRs | | Mutiple IT |
| | | doses of RNAi |
| | | agent on day |
| | | 13, 15, 17 |

[0409] Each of the MMP7 RNAi agents included modified nucleotides that were conjugated at the 5′ terminal end of the sense strand to an αvβ6 integrin targeting ligand having the modified sequences as set forth in the duplex structures herein. (See Tables 3, 4, 5, 6, 7A, 7B, 8, 9, 10, and 11 for specific modifications and structure information related to the MMP7 RNAi agents, including Tri-SM6.1-αvβ6). The MMP7 RNAi agents in Groups 3-8 each included nucleotide sequences that were designed to inhibit expression of a MMP7 gene by targeting specific positions of MMP7 mRNA as set forth in Table 50, above. (See, e.g., SEQ ID NO:1 and Table 2 for the MMP7 mRNA sequence referenced.)

[0410] Four (4) mice in each group were tested (n=4). MMP7 expression levels were determined pursuant to the procedure set forth above. Dose response of MMP7 RNAi agent AC001516 was observed in AAV6.2FF-CAG-hMMP7.UTRs mouse model. Data from the experiment are shown in the following Table 52:

TABLE 52
Average MMP7 Normalized to Control in AAV-hMMP7 Mice from Example 22.

| | Day 31 Lung tissue | | Day 31 BALF | | Day 31 | |
|---|---|---|---|---|---|---|
| | mRNA | | protein | | Lung tissue protein | |
| | Avg | Std Dev | Avg | Std Dev | Avg | Std Dev |
| Group ID | MMP7 | (+/-) | MMP7 | (+/-) | MMP7 | (+/-) |
| Group 1 (Saline vehicle) | N/A | | N/A | | N/A | |
| Group 2 (Saline vehicle) | 1.00 | 0.266 | 1.000 | 0.217 | 1.00 | 0.563 |
| Group 3 (3 mg/kg AC001651) | 0.319 | 0.159 | 0.174 | 0.061 | 0.358 | 0.077 |
| Group 4 (1.5 mg/kg AC001651) | 0.424 | 0.126 | 0.224 | 0.020 | 0.404 | 0.048 |
| Group 5 (0.75 mg/kg AC001651) | 0.606 | 0.105 | 0.440 | 0.155 | 0.524 | 0.083 |
| Group 6 (3 mg/kg AC002023) | 0.945 | 0.216 | 0.866 | 0.249 | 0.780 | 0.195 |
| Group 7 (1.5 mg/kg AC002023) | 1.100 | 0.119 | 1.046 | 0.734 | N/A | |
| Group 8 (0.75 mg/kg AC002023) | 1.100 | 0.186 | 0.753 | 0.364 | N/A | |

[0411] As shown in Table 52, above, the RNAi agent of Group 3 (targeting position 971) was active and showed reductions of approximately 68% on day 31 (0.159) at mRNA level in the lung tissues; 83% reduction of secreted human MMP7 protein and 64% reduction of human MMP7 protein in lung tissues.

### Example 23. Proof of Concept Efficacy Studies Using Rodent-Specific MMP7 RNAi Agent in Rat Bleomycin-Induced Injury Model

[0412] It has been demonstrated that MMP7 knockout mice are protected against bleomycin-mediated lung injury (Proc Natl Acad Sci USA. 2002; 99:6292-6297). To evaluate MMP7 RNAi agents, several proof of concept efficacy studies were developed using rodent-specific MMP7 RNAi agent in a rat bleomycin-induced injury model. MMP7 expression in a mouse bleomycin injury model was evaluated, and MMP7 mRNA levels were found to be not increased in lung tissues after bleomycin-induced injury. Furthermore, MMP7 expression transiently increased in rat lung tissues after bleomycin-induced injury. MMP7 expression peaked at 7-10 days after bleomycin-induced injury and decreased to baseline levels over 4-week period after injury.

[0413] One rat-specific RNAi agent was selected after screening and optimization in a rat bleomycin-induced injury model. Bleomycin was used to induce injury in rat. After injury, the RNAi agent was administered to the rat via 1.4 mg/kg single inhalation or multiple 3.0 mg/kg intratracheal doses. In the 2 to 4 weeks after the bleomycin-induced injury, the RNAi agent achieved 60-90% gene silencing of MMP7. Silencing MMP7 in the lung significantly attenuated lung injury in rat bleomycin model with reduced pulmonary fibrosis Ashcroft histology scores, reduced collagen deposition, decreased inflammatory response with reduced eosinophils and neutrophils in lavage fluid, decreased translatable fibrotic gene expression including Col1a2, Col5a1, Grem1, Cthrc1, Muc16. Furthermore, silencing MMP7 significantly improved pulmonary function with increased functional compliance, preserved blood oxygen content, less body weight loss and reduced mortality. MMP7 silencing by rodent-specific RNAi agent effectively protects lung from fibrosis development in intratracheal bleomycin injury model in rats.

### Example 24. Passive Uptake of MMP7 RNAi Agents in Human Precision Cut Lung Slices (PCLS)

[0414] Precision cut tissue slices (PCLS) represent an ex vivo model and tool for studying the structure and function of the lung in its native 3D environment, allowing for examination of the natural interactions between cells, molecules, and the extracellular matrix (ECM) ex vivo (Alsafadi H. N. et al, Am J Respir Cell Mol Biol 62(6): 681-691 (2020)). PCLS can be generated from various anatomical locations of the lung (distal and proximal), and from different species, including rodents, pigs, monkeys, and humans. However, the effectiveness of passive uptake of RNAi agents in human PCLS is still unclear. To validate the RNAi agent potency for silencing human MMP7 mRNA, fresh agarose inflated lung slices from healthy human donors were used for examination.

[0415] Saline or MMP7 RNAi agents were added to cell media, with daily media changes. The PCLS were cultured in the media from Day 1 to Day 7 and harvested at Day 8. mRNA expression of MMP7 and potential off target genes MAP3K9, MTF2, NUP107 were quantitated by qPCR normalized by endogenous control PPIA. Effective passive uptake of MMP7 RNAi agents was observed. Little off target effects was detected. MMP7 RNAi agent was administered according to the following Table 53. Data from the qPCR experiment are shown in the following Table 54.

[0416] Test Groups 11 and 12 were dosed with 1 μM AC002026. AC002026 is an RNAi agent duplex with the same modified antisense and sense strand sequences as those of AC001514. However, the AC002026 sense strand is conjugated to an inactive enantiomer of the αvβ6 integrin targeting ligand. Due to the difference in stereochemistry, this chemically modified analogue of αvβ6 integrin targeting ligand is unable to effectively bind to αvβ6 integrin, and therefore unable to effectively support cellular intake of the AC002026 RNAi agent.

TABLE 53
Dosing groups and dosing regimen of MMP7 RNAi
agents from Example 24.

| Group ID | Dosing Regimen |
|---|---|
| Group 1 (isotonic saline) | Treatment daily in the cell |
| | media for 7 days |
| Group 2 AC001514 1 μM | Treatment daily in the cell |
| | media for 7 days |
| Group 3 AC001514 0.3 μM | Treatment daily in the cell |
| | media for 7 days |
| Group 4 AC001514 0.1 μM | Treatment daily in the cell |
| | media for 7 days |
| Group 5 AC001651 1 μM | Treatment daily in the cell |
| | media for 7 days |
| Group 6 AC001651 0.3 μM | Treatment daily in the cell |
| | media for 7 days |
| Group 7 AC001651 0.1 μM | Treatment daily in the cell |
| | media for 7 days |
| Group 8 AC002023 1 μM | Treatment daily in the cell |
| | media for 7 days |
| Group 9 AC002023 0.3 μM | Treatment daily in the cell |
| | media for 7 days |
| Group 10 AC002023 0.1 μM | Treatment daily in the cell |
| | media for 7 days |
| Group 11 AC002026 1 μM | Treatment daily in the cell |
| | media for 7 days |
| Group 12 AC002026 1 μM | Treatment daily in the cell |
| | media for 7 days |

TABLE 54
mRNA Expression normalized to human endogenous control PPIA, in human PCLS from Example 24.

| | Avg | Std Dev | Avg | Std Dev | Avg | Std Dev | Avg | Std Dev |
|---|---|---|---|---|---|---|---|---|
| Group ID | MMP7 | (+/−) | MTF2 | (+/−) | MAP3K9 | (+/−) | NUP107 | (+/−) |
| Group 1 (isotonic saline) | 1.000 | 0.698 | 1.000 | 0.288 | 1.000 | 0.252 | 1.000 | 0.479 |
| Group 2 AC001514 1 μM | 0.414 | 1.132 | 1.196 | 0.610 | 1.394 | 0.631 | 0.904 | 0.779 |
| Group 3 AC001514 0.3 μM | 0.616 | 0.960 | 1.003 | 0.569 | 1.091 | 0.655 | 0.637 | 0.579 |
| Group 4 AC001514 0.1 μM | 0.470 | 0.509 | 0.680 | 1.065 | 0.847 | 0.489 | 0.466 | 1.327 |
| Group 5 AC001651 1 μM | 0.104 | 0.736 | 0.917 | 0.543 | 0.755 | 0.335 | 0.483 | 1.143 |
| Group 6 AC001651 0.3 μM | 0.102 | 0.284 | 1.575 | 0.492 | 1.221 | 0.867 | 0.675 | 0.633 |
| Group 7 AC001651 0.1 μM | 0.184 | 0.900 | 1.125 | 0.477 | 1.228 | 0.183 | 0.507 | 0.610 |
| Group 8 AC002023 1 μM | 0.769 | 1.522 | 0.888 | 0.703 | 1.500 | 0.417 | 0.601 | 0.589 |
| Group 9 AC002023 0.3 μM | 0.760 | 0.566 | 0.727 | 0.734 | 0.983 | 0.286 | 0.563 | 0.740 |
| Group 10 AC002023 0.1 μM | 0.651 | 0.961 | 0.918 | 0.408 | 1.565 | 0.505 | 0.606 | 0.473 |
| Group 11 AC002026 1 μM | 0.702 | 0.706 | 0.544 | 0.446 | 0.972 | 0.473 | 0.376 | 0.789 |
| Group 12 AC002026 1 μM | 0.603 | 1.081 | 0.863 | 0.757 | 0.972 | 0.472 | 0.713 | 1.106 |

[0417] Passive uptake of MMP7 RNAi agents was observed. As shown above in Table 54, the MMP7 RNAi agent uptake resulted in up to 82-90% MMP7 silencing from the most potent RNAi agent AC001651. This potency result is of similar rank order as the in vivo SEAP studies.

[0418] Concurrently, few off target effects were observed. The RNAi agents, upon dosing, caused only minor cytotoxic effects even at the highest dosing concentration. Such cytotoxicity and cell viability were demonstrated via MTT colorimetric assay for cell metabolic and mitochondrial activity. MTT assay showed MMP7 RNAi agent exhibiting comparable optical density (OD) as that of the control at 168 hours after dosing, as shown in FIG. 3.

### Example 25. In Vivo Inhaled Aerosolized Administration of MMP7 RNAi Agents in Cynomolgus Monkeys

[0419] On study day 1, male cynomolgus monkeys were administered a single deposited dose level of 0.24 mg/kg, 0.66 mg/kg, 1.10 mg/kg, or 1.71 mg/kg of the MMP7 RNAi agent AC001651 (see Tables 8, 6, and 3 for structural information.) or isotonic saline. Three (3) animals per group (n=3), anesthetized male non-human primates (NHPs) were exposed to either aerosolized Isotonic Saline (control article) or AC001651 (test articles) via inhalation using the face mask inhalation exposure system on Day 1. In this study, aerosols generated using a Hudson Updraft II compressed air jet nebulizer and delivered to animals by face mask inhalation. Concentration in test atmospheres were determined by gravimetric analysis of filter samples (47-mm fiber film filters, 0.5 micron, GF/A) collected during all exposures at a nominal flow. After collection, the filters were removed from the filter holders and weighed. Additionally, the contents of the filters were analyzed chemically by absorbance measurement on a SpectraMax i3x spectrophotometer. AC001651 formulation samples were analyzed for concentration at the time of filter analysis.

[0420] Target deposited doses for each of the three test articles for this study were 0.25 mg/kg, 0.5 mg/kg, 1.0 mg/kg and 2.0 mg/kg, respectively. The average deposited doses of saline control and AC001651 were 0.0, 0.24, 0.66, 1.10 and 1.71 mg/kg, respectively. The MMP7 RNAi agent was conjugated to a tridentate small molecule αvβ6 epithelial cell targeting ligand (Tri-SM6.1, see Table 11) at the 5′ terminal end of the sense strand, formulated in isotonic saline. The dosing groups were as follows:

TABLE 55
MMP7 RNAi Agent and Dosing for Example 25.

| | AC Duplex |
|---|---|
| Group ID | Number |
| Group 1 (isotonic saline) | N/A |
| Group 2 (0.25 mg/kg target deposited dose | AC001651 |
| Tri-SM6.1-αvß6-AD09887) | |
| (Average Pulmonary Deposited Dose PDD: | |
| 0.24 mg/kg) | |
| Group 3 (0.5 mg/kg target deposited dose | AC001651 |
| Tri-SM6.1-αvß6-AD09887) | |
| (Average Pulmonary Deposited Dose PDD: | |
| 0.66 mg/kg) | |
| Group 4 (1.0 mg/kg target deposited dose | AC001651 |
| Tri-SM6.1-αvß6-AD09887) | |
| (Average Pulmonary Deposited Dose PDD: | |
| 1.10 mg/kg) | |
| Group 5 (2.0 mg/kg target | AC001651 |
| deposited dose Tri-SM6.1-αvß6-AD09887) | |
| (Average Pulmonary Deposited Dose PDD: | |
| 1.71 mg/kg) | |

[0421] Three (3) monkeys were dosed per group. Bronchoalveolar lavage (BAL) fluid samples were collected at baseline on Day 1 and two weeks after a single inhalation exposure on Day 14. All animals were euthanized just after blood and BAL sample collection to collect tissue of interest. Monkeys were sacrificed on study day 14, and total RNA was isolated from lung samples following collection and homogenization. The data in Table 56 shows mRNA expression sampled from the right caudal lobe, the right cranial lobe, the right middle lobe, and the left caudal lobe. Cynomolgus monkey MMP7 mRNA expression was quantitated by probe-based quantitative PCR, normalized to Cynomolgus monkey GAPDH mRNA expression, and the vehicle control group (geometric mean, +/−geometric SD).

TABLE 56
Average Relative Cynomolgus Monkey MMP7 mRNA Expression at
Sacrifice in Example 25.

| Hilar Region | | | Middle Region | | | Peripheral Region | | |
|---|---|---|---|---|---|---|---|---|
| | Low | High | | Low | High | | Low | High |
| Average | (error) | (error) | Average | (error) | (error) | Average | (error) | (error) |

Right Caudal Lobe

| | | | | | | | | | |
|---|---|---|---|---|---|---|---|---|---|
| Group 1 | 1.000 | 0.630 | 1.700 | 1.000 | 0.540 | 1.176 | 1.000 | 0.514 | 1.060 |
| (isotonic | | | | | | | | | |
| saline) | | | | | | | | | |
| Group 2 | 1.113 | 0.269 | 0.354 | 0.609 | 0.078 | 0.089 | 1.099 | 0.238 | 0.304 |
| (0.24 | | | | | | | | | |
| mg/kg | | | | | | | | | |
| AC001651) | | | | | | | | | |
| Group 3 | 0.311 | 0.144 | 0.267 | 0.262 | 0.090 | 0.137 | 0.437 | 0.128 | 0.181 |
| (0.66 | | | | | | | | | |
| mg/kg | | | | | | | | | |
| AC001651) | | | | | | | | | |
| Group 4 | 0.259 | 0.067 | 0.091 | 0.240 | 0.105 | 0.188 | 0.310 | 0.141 | 0.258 |
| (1.10 | | | | | | | | | |
| mg/kg | | | | | | | | | |
| AC001651) | | | | | | | | | |
| Group 5 | 0.583 | 0.313 | 0.674 | 0.251 | 0.111 | 0.200 | 0.359 | 0.167 | 0.313 |
| (1.71 | | | | | | | | | |
| mg/kg | | | | | | | | | |
| AC001651) | | | | | | | | | |

Right Cranial Lobe

| | | | | | | | | | |
|---|---|---|---|---|---|---|---|---|---|
| Group 1 | 1.000 | 0.522 | 1.091 | 1.000 | 0.426 | 0.742 | 1.000 | 0.439 | 0.782 |
| (isotonic | | | | | | | | | |
| saline) | | | | | | | | | |
| Group 2 | 0.630 | 0.126 | 0.157 | 0.965 | 0.280 | 0.395 | 1.416 | 0.313 | 0.401 |
| (0.24 | | | | | | | | | |
| mg/kg | | | | | | | | | |
| AC001651) | | | | | | | | | |
| Group 3 | 0.390 | 0.150 | 0.243 | 0.448 | 0.210 | 0.395 | 0.385 | 0.077 | 0.097 |
| (0.66 | | | | | | | | | |
| mg/kg | | | | | | | | | |
| AC001651) | | | | | | | | | |
| Group 4 | 0.216 | 0.093 | 0.162 | 0.221 | 0.087 | 0.142 | 0.193 | 0.054 | 0.075 |
| (1.10 | | | | | | | | | |
| mg/kg | | | | | | | | | |
| AC001651) | | | | | | | | | |
| Group 5 | 0.222 | 0.131 | 0.318 | 0.307 | 0.133 | 0.236 | 0.559 | 0.316 | 0.728 |
| (1.71 | | | | | | | | | |
| mg/kg | | | | | | | | | |
| AC001651) | | | | | | | | | |

Right Middle Lobe

| | | | | | | | | | |
|---|---|---|---|---|---|---|---|---|---|
| Group 1 | 1.000 | 0.572 | 1.336 | 1.000 | 0.425 | 0.741 | 1.000 | 0.443 | 0.796 |
| (isotonic | | | | | | | | | |
| saline) | | | | | | | | | |
| Group 2 | 1.011 | 0.127 | 0.146 | 0.544 | 0.095 | 0.114 | 0.349 | 0.138 | 0.227 |
| (0.24 | | | | | | | | | |
| mg/kg | | | | | | | | | |
| AC001651) | | | | | | | | | |
| Group 3 | 0.337 | 0.107 | 0.157 | 0.301 | 0.066 | 0.084 | 0.217 | 0.033 | 0.039 |
| (0.66 | | | | | | | | | |
| mg/kg | | | | | | | | | |
| AC001651) | | | | | | | | | |
| Group 4 | 0.339 | 0.131 | 0.214 | 0.207 | 0.099 | 0.190 | 0.143 | 0.072 | 0.146 |
| (1.10 | | | | | | | | | |
| mg/kg | | | | | | | | | |
| AC001651) | | | | | | | | | |
| Group 5 | 0.236 | 0.118 | 0.238 | 0.224 | 0.096 | 0.169 | 0.265 | 0.097 | 0.154 |

(1.71
mg/kg
AC001651)
Left Middle Lobe

| | | | | | | | | | |
|---|---|---|---|---|---|---|---|---|---|
| Group 1 | 1.000 | 0.579 | 1.376 | 1.000 | 0.504 | 1.014 | 1.000 | 0.461 | 0.856 |
| (isotonic | | | | | | | | | |
| saline) | | | | | | | | | |
| Group 2 | 1.460 | 0.162 | 0.182 | 1.208 | 0.150 | 0.171 | 0.996 | 0.280 | 0.390 |
| (0.24 | | | | | | | | | |
| mg/kg | | | | | | | | | |
| AC001651) | | | | | | | | | |
| Group 3 | 0.464 | 0.205 | 0.366 | 0.438 | 0.131 | 0.186 | 0.513 | 0.269 | 0.564 |
| (0.66 | | | | | | | | | |
| mg/kg | | | | | | | | | |
| AC001651) | | | | | | | | | |
| Group 4 | 0.252 | 0.119 | 0.226 | 0.355 | 0.182 | 0.373 | 0.222 | 0.101 | 0.186 |
| (1.10 | | | | | | | | | |
| mg/kg | | | | | | | | | |
| AC001651) | | | | | | | | | |
| Group 5 | 0.400 | 0.190 | 0.363 | 0.366 | 0.154 | 0.265 | 0.364 | 0.164 | 0.298 |
| (1.71 | | | | | | | | | |
| mg/kg | | | | | | | | | |
| AC001651) | | | | | | | | | |

[0422] As shown in the data in Table 56 above, RNAi agent AC001651 showed substantial inhibition across various regions and lobes of the lung demonstrating the ability to robustly silence MMP7 expression in non-human primates.

[0423] Cynomolgus monkey MMP7 protein expression in the lung tissues was quantitated by Western blot using iBright imaging system (Thermo Fisher), shown in the following Table 57.

TABLE 57
Average Relative Cynomolgus Monkey MMP7 Protein Expression
at Sacrifice in Example 25.

| | MMP7 Protein expression | |
|---|---|---|
| | in lung tissue | |
| | (Right Caudal Lobe) | |
| Group ID | Avg MMP7 | Std Dev (+/−) |
| Group 1 (isotonic saline) | 1.000 | 0.772 |
| Group 2 (0.24 mg/kg PDD AC001651) | 0.778 | 0.258 |
| Group 3 (0.66 mg/kg PDD AC001651) | 0.394 | 0.166 |
| Group 4 (1.10 mg/kg PDD AC001651) | 0.309 | 0.160 |
| Group 5 (1.71 mg/kg PDD AC001651) | 0.399 | 0.206 |

[0424] As shown in the data in Table 57 above, RNAi agent AC001651 silences MMP7 expression, showing average ˜69% reduction in protein expression at 1.10 mg/kg deposited dose in lung tissues in non-human primates. PDD=pulmonary deposited dose.

[0425] MMP7 mRNA expression in BAL exosome in cynomolgus monkeys treated with single deposited dose of 0.24 mg/kg, 0.66 mg/kg, 1.10 mg/kg, or 1.71 mg/kg PDD of RNAi agent AC001651 was quantified via qPCR. The data are normalized to baseline Day −7 and GAPDH and the vehicle control group (GMEAN+/− with geometric standard deviation. The data is shown below in Table 58.

TABLE 58
MMP7 mRNA expression in BAL exosome, relative to GAPDH.

| | Baseline (Day-7) | | Day 14 | |
|---|---|---|---|---|
| | | Std | | Std |
| | Avg | Dev | Avg | Dev |
| Group ID | MMP7 | (+/−) | MMP7 | (+/−) |
| Group 1 (isotonic saline) | 1.000 | 1.045 | 2.071 | 0.717 |
| Group 2 | 1.000 | 1.416 | 1.252 | 1.110 |
| (0.24 mg/kg PDD AC001651) | | | | |
| Group 3 | 1.000 | 0.806 | 0.428 | 1.406 |
| (0.66 mg/kg PDD AC001651) | | | | |
| Group 4 | 1.000 | 0.407 | 0.358 | 0.779 |
| (1.10 mg/kg PDD AC001651) | | | | |
| Group 5 | 1.000 | 0.473 | 0.432 | 0.470 |
| (1.71 mg/kg PDD AC001651) | | | | |

[0426] As shown in the data in Table 58 above, RNAi agent AC001651 robustly silences MMP7 expression, showing average ˜64% reduction in MMP7 mRNA in BAL exosomes at 1.10 mg/kg deposited dose in non-human primates.

[0427] Cynomolgus monkey MMP7 protein expression in BAL was quantitated by Western blot using iBright imaging system (Thermo Fisher), shown in the following Table 59.

TABLE 59
MMP7 protein expression in BAL.

| | Baseline (Day-7) | | Day 14 | |
|---|---|---|---|---|
| | | Std | | Std |
| | Avg | Dev | Avg | Dev |
| Group ID | MMP7 | (+/−) | MMP7 | (+/−) |
| Group 1 (isotonic saline) | 1.000 | N/A | 0.933 | 0.698 |
| Group 2 | 1.000 | N/A | 0.617 | 0.020 |
| (0.24 mg/kg PDD AC001651) | | | | |
| Group 3 | 1.000 | N/A | 0.218 | 0.161 |
| (0.66 mg/kg PDD AC001651) | | | | |
| Group 4 | 1.000 | N/A | 0.593 | 0.552 |
| (1.10 mg/kg PDD AC001651) | | | | |
| Group 5 | 1.000 | N/A | 0.299 | 0.131 |
| (1.71 mg/kg PDD AC001651) | | | | |

[0428] As shown in the data in Table 59 above, RNAi agent AC001651 robustly silences MMP7 expression, showing average ˜78% reduction in protein expression in BAL at 0.66 mg/kg deposited dose in non-human primates.

### Other Embodiments

[0429] It is to be understood that while the invention has been described in conjunction with the detailed description thereof, the foregoing description is intended to illustrate and not limit the scope of the invention, which is defined by the scope of the appended claims. Other aspects, advantages, and modifications are within the scope of the following claims.

1. An RNAi agent for inhibiting expression of a matrix metallopeptidase 7 gene, comprising:
an antisense strand comprising the nucleotide sequence (5′→3′) UGACAUUCAAAAACCAACU (Seq ID No. 176); and
a sense strand comprising a nucleotide sequence that is at least partially complementary to the antisense strand,
wherein at least one nucleotide of the RNAi agent is a modified nucleotide or includes a modified internucleoside linkage.

2. The RNAi agent of claim 1, wherein the antisense strand comprises the nucleotide sequence (5′→3′) UGACAUUCAAAAACCAACUGC (Seq ID No. 679).

3. (canceled)

4. (canceled)

5. (canceled)

6. The RNAi agent of claim 1, wherein the modified nucleotide is selected from the group consisting of: 2′-O-methyl nucleotide, 2′-fluoro nucleotide, 2′-deoxy nucleotide, 2′,3′-seco nucleotide mimic, locked nucleotide, 2′-F-arabino nucleotide, 2′-methoxyethyl nucleotide, abasic nucleotide, ribitol, inverted nucleotide, inverted 2′-O-methyl nucleotide, inverted 2′-deoxy nucleotide, 2′-amino-modified nucleotide, 2′-alkyl-modified nucleotide, morpholino nucleotide, vinyl phosphonate-containing nucleotide, cyclopropyl phosphonate-containing nucleotide, and 3′-O-methyl nucleotide.

7. (canceled)

8. (canceled)

9. The RNAi agent of claim 1, wherein the sense strand comprises the nucleotide sequence (5′→3′) GCAGUUGGUUUUUGAAUGUCA (Seq ID No. 726).

10. (canceled)

11. The RNAi agent of claim 1, wherein the sense strand is between 18 and 30 nucleotides in length, and the antisense strand is between 18 and 30 nucleotides in length.

12. (canceled)

13. (canceled)

14. (canceled)

15. The RNAi agent of claim 11, wherein the RNAi agent has two blunt ends.

16. The RNAi agent of claim 9, wherein the sense strand comprises one or two terminal caps.

17. The RNAi agent of claim 9, wherein the sense strand comprises one or two inverted abasic residues.

18. (canceled)

19. (canceled)

20. (canceled)

21. (canceled)

22. (canceled)

23. The RNAi agent of claim 1, comprising an antisense strand that comprises the nucleotide sequence (5′→3′):
cPrpuGfacauucAfaaAfaCfcAfacugsc (SEQ ID NO:406);
wherein a, c, g, and u represent 2′-O-methyl adenosine, 2′-O-methyl cytidine, 2′-O-methyl guanosine, and 2′-O-methyl uridine, respectively; Af, Cf, Gf, and Uf represent 2′-fluoro adenosine, 2′-fluoro cytidine, 2′-fluoro guanosine, and 2′-fluoro uridine, respectively; cPrpu represents a 5′-cyclopropyl phosphonate-2′-O-methyl uridine; s represents a phosphorothioate linkage; and wherein all or substantially all of the nucleotides on the sense strand are modified nucleotides.

24. The RNAi agent of claim 23, wherein the sense strand comprises the nucleotide sequence (5′→3′):
gscaguuggUfuUfuUfgaauguca (SEQ ID NO:526);
wherein a, c, g, i, and u represent 2′-O-methyl adenosine, 2′-O-methyl cytidine, 2′-O-methyl guanosine, 2′-O-methyl inosine, and 2′-O-methyl uridine, respectively; Af, Cf, Gf, and Uf represent 2′-fluoro adenosine, 2′-fluoro cytidine, 2′-fluoro guanosine, and 2′-fluoro uridine, respectively; and s represents a phosphorothioate linkage; and wherein all or substantially all of the nucleotides on the antisense strand are modified nucleotides.

25. The RNAi agent of claim 35, wherein the sense strand further includes inverted abasic residues at the 3′ terminal end of the nucleotide sequence, at the 5′ end of the nucleotide sequence, or at both.

26. The RNAi agent of claim 24, wherein the RNAi agent is linked to a targeting ligand.

27. The RNAi agent of claim 26, wherein the targeting ligand has affinity for a cell receptor expressed on an epithelial cell.

28. The RNAi agent of claim 27, wherein the targeting ligand comprises an integrin targeting ligand.

29. The RNAi agent of claim 28, wherein the integrin targeting ligand is an αvβ6 integrin targeting ligand.

30. The RNAi agent of claim 29, wherein the targeting ligand comprises the structure: [chemical structure]
or a pharmaceutically acceptable salt thereof, or [chemical structure]
or a pharmaceutically acceptable salt thereof,
wherein [symbol] indicates the point of connection to the RNAi agent.

31. The RNAi agent of claim 26, wherein the targeting ligand has a structure selected from the group consisting of: [chemical structure] [chemical structure] [chemical structure] [chemical structure] [chemical structure] [chemical structure] [chemical structure] [chemical structure] [chemical structure]
wherein [symbol] indicates the point of connection to the RNAi agent.

32. The RNAi agent of claim 31, wherein RNAi agent is conjugated to a targeting ligand having the following structure:

[chemical structure]

33. The RNAi agent of claim 26, wherein the targeting ligand has the following structure:

[chemical structure]

34. The RNAi agent of claim 32, wherein the targeting ligand is conjugated to the sense strand.

35. The RNAi agent of claim 34, wherein the targeting ligand is conjugated to the 5′ terminal end of the sense strand.

36. A composition comprising the RNAi agent of claim 25, wherein the composition further comprises a pharmaceutically acceptable excipient.

37. The composition of claim 36, further comprising a second RNAi agent capable of inhibiting the expression of matrix metallopeptidase 7 gene expression.

38. The composition of claim 36, further comprising one or more additional therapeutics.

39. The composition of claim 36, wherein the composition is formulated for administration by inhalation.

40. (canceled)

41. The composition of claim 36, wherein the RNAi agent is a sodium salt.

42. (canceled)

43. (canceled)

44. A method for inhibiting expression of a MMP7 gene in a cell, the method comprising introducing into a cell an effective amount of the RNAi agent of claim 25.

45. The method of claim 44, wherein the cell is within a subject.

46. The method of claim 45, wherein the subject is a human subject.

47. (canceled)

48. A method of treating one or more symptoms or diseases associated with enhanced or elevated membrane MMP7 activity levels, the method comprising administering to a human subject in need thereof a therapeutically effective amount of the composition of claim 36.

49. The method of claim 48, wherein the disease is idiopathic pulmonary fibrosis (IPF), asthma, another type of fibrosis, chronic inflammation, interstitial lung diseases (ILD), SARS-COV-2 or another type of infectious disease, acute respiratory distress syndrome (ARDS) or another type of acute lung injury, pulmonary hypertension, cancer, nonalcoholic fatty liver disease (NAFLD), nonalcoholic steatohepatitis (NASH), fatty liver disease, biliary atresia, and chronic kidney disease (CKD).

50. The method of claim 49, wherein the disease is idiopathic pulmonary fibrosis (IPF).

51. The method of claim 48, wherein the RNAi agent is administered at a deposited dose of about 0.01 mg/kg to about 5.0 mg/kg of body weight of the subject.

52. (canceled)

53. The method of claim 48, wherein the RNAi agent is administered in two or more doses.

54. (canceled)

55. (canceled)

56. (canceled)

57. (canceled)

58. (canceled)

59. (canceled)

60. (canceled)

61. A pharmaceutically acceptable salt of the RNAi agent of claim 23.

62. The pharmaceutically acceptable salt of claim 61, wherein the pharmaceutically acceptable salt is a sodium salt.

63. The RNAi agent of claim 2, wherein the sense strand comprises the nucleotide sequence (5′→3′) GCAGUUGGUUUUUGAAUGUCA (Seq ID No. 726), wherein the sense strand comprises one or two inverted abasic residues.

The application's sequence listing, which the Patent Office published only in electronic form, follows.

SEQUENCE LISTING (730 sequences)

SEQ ID NO: 1 - DNA, 1119 bp, synthetic construct
  source 1..1119: mol_type = other DNA
accaaatcaaccataggtccaagaacaattgtctctggacggcagctatgcgactcaccgtgctgtgtgctgtgtgcctgctgcctggcagcctggccctgccgctgcctcaggaggcgggaggcatgagtgagctacagtgggaacaggctcaggactatctcaagagattttatctctatgactcagaaacaaaaaatgccaacagtttagaagccaaactcaaggagatgcaaaaattctttggcctacctataactggaatgttaaactcccgcgtcatagaaataatgcagaagcccagatgtggagtgccagatgttgcagaatactcactatttccaaatagcccaaaatggacttccaaagtggtcacctacaggatcgtatcatatactcgagacttaccgcatattacagtggatcgattagtgtcaaaggctttaaacatgtggggcaaagagatccccctgcatttcaggaaagttgtatggggaactgctgacatcatgattggctttgcgcgaggagctcatggggactcctacccatttgatgggccaggaaacacgctggctcatgcctttgcgcctgggacaggtctcggaggagatgctcacttcgatgaggatgaacgctggacggatggtagcagtctagggattaacttcctgtatgctgcaactcatgaacttggccattctttgggtatgggacattcctctgatcctaatgcagtgatgtatccaacctatggaaatggagatccccaaaattttaaactttcccaggatgatattaaaggcattcagaaactatatggaaagagaagtaattcaagaaagaaatagaaacttcaggcagaacatccattcattcattcattggattgtatatcattgttgcacaatcagaattgataagcactgttcctccactccatttagcaattatgtcacccttttttattgcagttggtttttgaatgtctttcactccttttaaggataaactcctttatggtgtgactgtgtcttattcatctatacttgcagtgggtagatgtcaataaatgttacatacacaaataaataaaatgtttattccatggtaaattta

SEQ ID NO: 2 - RNA, 19 nt, synthetic construct
  source 1..19: mol_type = other RNA
atgtggagtgccagatgtt

SEQ ID NO: 3 - RNA, 19 nt, synthetic construct
  source 1..19: mol_type = other RNA
gtggagtgccagatgttgc

SEQ ID NO: 4 - RNA, 19 nt, synthetic construct
  source 1..19: mol_type = other RNA
tggagtgccagatgttgca

SEQ ID NO: 5 - RNA, 19 nt, synthetic construct
  source 1..19: mol_type = other RNA
gagtgccagatgttgcaga

SEQ ID NO: 6 - RNA, 19 nt, synthetic construct
  source 1..19: mol_type = other RNA
agtgccagatgttgcagaa

SEQ ID NO: 7 - RNA, 19 nt, synthetic construct
  source 1..19: mol_type = other RNA
gtgccagatgttgcagaat

SEQ ID NO: 8 - RNA, 19 nt, synthetic construct
  source 1..19: mol_type = other RNA
tgccagatgttgcagaata

SEQ ID NO: 9 - RNA, 19 nt, synthetic construct
  source 1..19: mol_type = other RNA
catttgatgggccaggaaa

SEQ ID NO: 10 - RNA, 19 nt, synthetic construct
  source 1..19: mol_type = other RNA
tgatgggccaggaaacacg

SEQ ID NO: 11 - RNA, 19 nt, synthetic construct
  source 1..19: mol_type = other RNA
ggctcaggactatctcaag

SEQ ID NO: 12 - RNA, 19 nt, synthetic construct
  source 1..19: mol_type = other RNA
ctcaagagattttatctct

SEQ ID NO: 13 - RNA, 19 nt, synthetic construct
  source 1..19: mol_type = other RNA
agagattttatctctatga

SEQ ID NO: 14 - RNA, 19 nt, synthetic construct
  source 1..19: mol_type = other RNA
gattttatctctatgactc

SEQ ID NO: 15 - RNA, 19 nt, synthetic construct
  source 1..19: mol_type = other RNA
tgtggagtgccagatgtta

SEQ ID NO: 16 - RNA, 19 nt, synthetic construct
  source 1..19: mol_type = other RNA
agtgccagatgttgcagaa

SEQ ID NO: 17 - RNA, 19 nt, synthetic construct
  source 1..19: mol_type = other RNA
cagatgttgcagaatactc

SEQ ID NO: 18 - RNA, 19 nt, synthetic construct
  source 1..19: mol_type = other RNA
ttgcagaatactcactatt

SEQ ID NO: 19 - RNA, 19 nt, synthetic construct
  source 1..19: mol_type = other RNA
tgcagaatactcactattt

SEQ ID NO: 20 - RNA, 19 nt, synthetic construct
  source 1..19: mol_type = other RNA
tacagtggatcgattagtg

SEQ ID NO: 21 - RNA, 19 nt, synthetic construct
  source 1..19: mol_type = other RNA
acagtggatcgattagtgt

SEQ ID NO: 22 - RNA, 19 nt, synthetic construct
  source 1..19: mol_type = other RNA
gtggatcgattagtgtcaa

SEQ ID NO: 23 - RNA, 19 nt, synthetic construct
  source 1..19: mol_type = other RNA
gagatgctcacttcgatga

SEQ ID NO: 24 - RNA, 19 nt, synthetic construct
  source 1..19: mol_type = other RNA
attaacttcctgtatgcta

SEQ ID NO: 25 - RNA, 19 nt, synthetic construct
  source 1..19: mol_type = other RNA
agtgatgtatccaacctat

SEQ ID NO: 26 - RNA, 19 nt, synthetic construct
  source 1..19: mol_type = other RNA
gtatccaacctatggaaat

SEQ ID NO: 27 - RNA, 19 nt, synthetic construct
  source 1..19: mol_type = other RNA
aaggcattcagaaactata

SEQ ID NO: 28 - RNA, 19 nt, synthetic construct
  source 1..19: mol_type = other RNA
gttgcacaatcagaattga

SEQ ID NO: 29 - RNA, 19 nt, synthetic construct
  source 1..19: mol_type = other RNA
ttgcacaatcagaattgat

SEQ ID NO: 30 - RNA, 19 nt, synthetic construct
  source 1..19: mol_type = other RNA
caatcagaattgataagca

SEQ ID NO: 31 - RNA, 19 nt, synthetic construct
  source 1..19: mol_type = other RNA
aatcagaattgataagcaa

SEQ ID NO: 32 - RNA, 19 nt, synthetic construct
  source 1..19: mol_type = other RNA
gtcacccttttttattgca

SEQ ID NO: 33 - RNA, 19 nt, synthetic construct
  source 1..19: mol_type = other RNA
gcagttggtttttgaatgt

SEQ ID NO: 34 - RNA, 19 nt, synthetic construct
  source 1..19: mol_type = other RNA
agttggtttttgaatgtct

SEQ ID NO: 35 - RNA, 19 nt, synthetic construct
  source 1..19: mol_type = other RNA
gttggtttttgaatgtctt

SEQ ID NO: 36 - RNA, 19 nt, synthetic construct
  source 1..19: mol_type = other RNA
ctccttttaaggataaact

SEQ ID NO: 37 - RNA, 19 nt, synthetic construct
  source 1..19: mol_type = other RNA
aacatctggcactccacat

SEQ ID NO: 38 - RNA, 19 nt, synthetic construct
  source 1..19: mol_type = other RNA
tacatctggcactccacat

SEQ ID NO: 39 - RNA, 19 nt, synthetic construct
  source 1..19: mol_type = other RNA
nacatctggcactccacat

SEQ ID NO: 40 - RNA, 19 nt, synthetic construct
  source 1..19: mol_type = other RNA
nacatctggcactccacan

SEQ ID NO: 41 - RNA, 19 nt, synthetic construct
  source 1..19: mol_type = other RNA
tcaacatctggcactccac

SEQ ID NO: 42 - RNA, 19 nt, synthetic construct
  source 1..19: mol_type = other RNA
acaacatctggcactccac

SEQ ID NO: 43 - RNA, 19 nt, synthetic construct
  source 1..19: mol_type = other RNA
gcaacatctggcactccac

SEQ ID NO: 44 - RNA, 19 nt, synthetic construct
  source 1..19: mol_type = other RNA
ncaacatctggcactccac

SEQ ID NO: 45 - RNA, 19 nt, synthetic construct
  source 1..19: mol_type = other RNA
ncaacatctggcactccan

SEQ ID NO: 46 - RNA, 19 nt, synthetic construct
  source 1..19: mol_type = other RNA
tgcaacatctggcactcca

SEQ ID NO: 47 - RNA, 19 nt, synthetic construct
  source 1..19: mol_type = other RNA
agcaacatctggcactcca

SEQ ID NO: 48 - RNA, 19 nt, synthetic construct
  source 1..19: mol_type = other RNA
ngcaacatctggcactcca

SEQ ID NO: 49 - RNA, 19 nt, synthetic construct
  source 1..19: mol_type = other RNA
ngcaacatctggcactccn

SEQ ID NO: 50 - RNA, 19 nt, synthetic construct
  source 1..19: mol_type = other RNA
tctgcaacatctggcactc

SEQ ID NO: 51 - RNA, 19 nt, synthetic construct
  source 1..19: mol_type = other RNA
actgcaacatctggcactc

SEQ ID NO: 52 - RNA, 19 nt, synthetic construct
  source 1..19: mol_type = other RNA
nctgcaacatctggcactc

SEQ ID NO: 53 - RNA, 19 nt, synthetic construct
  source 1..19: mol_type = other RNA
nctgcaacatctggcactn

SEQ ID NO: 54 - RNA, 19 nt, synthetic construct
  source 1..19: mol_type = other RNA
ttctgcaacatctggcact

SEQ ID NO: 55 - RNA, 19 nt, synthetic construct
  source 1..19: mol_type = other RNA
atctgcaacatctggcact

SEQ ID NO: 56 - RNA, 19 nt, synthetic construct
  source 1..19: mol_type = other RNA
ntctgcaacatctggcact

SEQ ID NO: 57 - RNA, 19 nt, synthetic construct
  source 1..19: mol_type = other RNA
ntctgcaacatctggcacn

SEQ ID NO: 58 - RNA, 19 nt, synthetic construct
  source 1..19: mol_type = other RNA
attctgcaacatctggcac

SEQ ID NO: 59 - RNA, 19 nt, synthetic construct
  source 1..19: mol_type = other RNA
tttctgcaacatctggcac

SEQ ID NO: 60 - RNA, 19 nt, synthetic construct
  source 1..19: mol_type = other RNA
nttctgcaacatctggcac

SEQ ID NO: 61 - RNA, 19 nt, synthetic construct
  source 1..19: mol_type = other RNA
nttctgcaacatctggcan

SEQ ID NO: 62 - RNA, 19 nt, synthetic construct
  source 1..19: mol_type = other RNA
tattctgcaacatctggca

SEQ ID NO: 63 - RNA, 19 nt, synthetic construct
  source 1..19: mol_type = other RNA
aattctgcaacatctggca

SEQ ID NO: 64 - RNA, 19 nt, synthetic construct
  source 1..19: mol_type = other RNA
nattctgcaacatctggca

SEQ ID NO: 65 - RNA, 19 nt, synthetic construct
  source 1..19: mol_type = other RNA
nattctgcaacatctggcn

SEQ ID NO: 66 - RNA, 19 nt, synthetic construct
  source 1..19: mol_type = other RNA
tttcctggcccatcaaatg

SEQ ID NO: 67 - RNA, 19 nt, synthetic construct
  source 1..19: mol_type = other RNA
attcctggcccatcaaatg

SEQ ID NO: 68 - RNA, 19 nt, synthetic construct
  source 1..19: mol_type = other RNA
nttcctggcccatcaaatg

SEQ ID NO: 69 - RNA, 19 nt, synthetic construct
  source 1..19: mol_type = other RNA
nttcctggcccatcaaatn

SEQ ID NO: 70 - RNA, 19 nt, synthetic construct
  source 1..19: mol_type = other RNA
tgtgtttcctggcccatca

SEQ ID NO: 71 - RNA, 19 nt, synthetic construct
  source 1..19: mol_type = other RNA
agtgtttcctggcccatca

SEQ ID NO: 72 - RNA, 19 nt, synthetic construct
  source 1..19: mol_type = other RNA
cgtgtttcctggcccatca

SEQ ID NO: 73 - RNA, 19 nt, synthetic construct
  source 1..19: mol_type = other RNA
ngtgtttcctggcccatca

SEQ ID NO: 74 - RNA, 19 nt, synthetic construct
  source 1..19: mol_type = other RNA
ngtgtttcctggcccatcn

SEQ ID NO: 75 - RNA, 19 nt, synthetic construct
  source 1..19: mol_type = other RNA
tttgagatagtcctgagcc

SEQ ID NO: 76 - RNA, 19 nt, synthetic construct
  source 1..19: mol_type = other RNA
attgagatagtcctgagcc

SEQ ID NO: 77 - RNA, 19 nt, synthetic construct
  source 1..19: mol_type = other RNA
cttgagatagtcctgagcc

SEQ ID NO: 78 - RNA, 19 nt, synthetic construct
  source 1..19: mol_type = other RNA
nttgagatagtcctgagcc

SEQ ID NO: 79 - RNA, 19 nt, synthetic construct
  source 1..19: mol_type = other RNA
nttgagatagtcctgagcn

SEQ ID NO: 80 - RNA, 19 nt, synthetic construct
  source 1..19: mol_type = other RNA
agagataaaatctcttgag

SEQ ID NO: 81 - RNA, 19 nt, synthetic construct
  source 1..19: mol_type = other RNA
tgagataaaatctcttgag

SEQ ID NO: 82 - RNA, 19 nt, synthetic construct
  source 1..19: mol_type = other RNA
ngagataaaatctcttgag

SEQ ID NO: 83 - RNA, 19 nt, synthetic construct
  source 1..19: mol_type = other RNA
ngagataaaatctcttgan

SEQ ID NO: 84 - RNA, 19 nt, synthetic construct
  source 1..19: mol_type = other RNA
tcatagagataaaatctct

SEQ ID NO: 85 - RNA, 19 nt, synthetic construct
  source 1..19: mol_type = other RNA
acatagagataaaatctct

SEQ ID NO: 86 - RNA, 19 nt, synthetic construct
  source 1..19: mol_type = other RNA
ncatagagataaaatctct

SEQ ID NO: 87 - RNA, 19 nt, synthetic construct
  source 1..19: mol_type = other RNA
ncatagagataaaatctcn

SEQ ID NO: 88 - RNA, 19 nt, synthetic construct
  source 1..19: mol_type = other RNA
tagtcatagagataaaatc

SEQ ID NO: 89 - RNA, 19 nt, synthetic construct
  source 1..19: mol_type = other RNA
aagtcatagagataaaatc

SEQ ID NO: 90 - RNA, 19 nt, synthetic construct
  source 1..19: mol_type = other RNA
gagtcatagagataaaatc

SEQ ID NO: 91 - RNA, 19 nt, synthetic construct
  source 1..19: mol_type = other RNA
nagtcatagagataaaatc

SEQ ID NO: 92 - RNA, 19 nt, synthetic construct
  source 1..19: mol_type = other RNA
nagtcatagagataaaatn

SEQ ID NO: 93 - RNA, 19 nt, synthetic construct
  source 1..19: mol_type = other RNA
taacatctggcactccaca

SEQ ID NO: 94 - RNA, 19 nt, synthetic construct
  source 1..19: mol_type = other RNA
aaacatctggcactccaca

SEQ ID NO: 95 - RNA, 19 nt, synthetic construct
  source 1..19: mol_type = other RNA
naacatctggcactccaca

SEQ ID NO: 96 - RNA, 19 nt, synthetic construct
  source 1..19: mol_type = other RNA
naacatctggcactccacn

SEQ ID NO: 97 - RNA, 19 nt, synthetic construct
  source 1..19: mol_type = other RNA
ttctgcaacatctggcact

SEQ ID NO: 98 - RNA, 19 nt, synthetic construct
  source 1..19: mol_type = other RNA
atctgcaacatctggcact

SEQ ID NO: 99 - RNA, 19 nt, synthetic construct
  source 1..19: mol_type = other RNA
ntctgcaacatctggcact

SEQ ID NO: 100 - RNA, 19 nt, synthetic construct
  source 1..19: mol_type = other RNA
ntctgcaacatctggcacn

SEQ ID NO: 101 - RNA, 19 nt, synthetic construct
  source 1..19: mol_type = other RNA
tagtattctgcaacatctg

SEQ ID NO: 102 - RNA, 19 nt, synthetic construct
  source 1..19: mol_type = other RNA
aagtattctgcaacatctg

SEQ ID NO: 103 - RNA, 19 nt, synthetic construct
  source 1..19: mol_type = other RNA
gagtattctgcaacatctg

SEQ ID NO: 104 - RNA, 19 nt, synthetic construct
  source 1..19: mol_type = other RNA
nagtattctgcaacatctg

SEQ ID NO: 105 - RNA, 19 nt, synthetic construct
  source 1..19: mol_type = other RNA
nagtattctgcaacatctn

SEQ ID NO: 106 - RNA, 19 nt, synthetic construct
  source 1..19: mol_type = other RNA
aatagtgagtattctgcaa

SEQ ID NO: 107 - RNA, 19 nt, synthetic construct
  source 1..19: mol_type = other RNA
tatagtgagtattctgcaa

SEQ ID NO: 108 - RNA, 19 nt, synthetic construct
  source 1..19: mol_type = other RNA
natagtgagtattctgcaa

SEQ ID NO: 109 - RNA, 19 nt, synthetic construct
  source 1..19: mol_type = other RNA
natagtgagtattctgcan

SEQ ID NO: 110 - RNA, 19 nt, synthetic construct
  source 1..19: mol_type = other RNA
aaatagtgagtattctgca

SEQ ID NO: 111 - RNA, 19 nt, synthetic construct
  source 1..19: mol_type = other RNA
taatagtgagtattctgca

SEQ ID NO: 112 - RNA, 19 nt, synthetic construct
  source 1..19: mol_type = other RNA
naatagtgagtattctgca

SEQ ID NO: 113 - RNA, 19 nt, synthetic construct
  source 1..19: mol_type = other RNA
naatagtgagtattctgcn

SEQ ID NO: 114 - RNA, 19 nt, synthetic construct
  source 1..19: mol_type = other RNA
tactaatcgatccactgta

SEQ ID NO: 115 - RNA, 19 nt, synthetic construct
  source 1..19: mol_type = other RNA
aactaatcgatccactgta

SEQ ID NO: 116 - RNA, 19 nt, synthetic construct
  source 1..19: mol_type = other RNA
cactaatcgatccactgta

SEQ ID NO: 117 - RNA, 19 nt, synthetic construct
  source 1..19: mol_type = other RNA
nactaatcgatccactgta

SEQ ID NO: 118 - RNA, 19 nt, synthetic construct
  source 1..19: mol_type = other RNA
nactaatcgatccactgtn

SEQ ID NO: 119 - RNA, 19 nt, synthetic construct
  source 1..19: mol_type = other RNA
acactaatcgatccactgt

SEQ ID NO: 120 - RNA, 19 nt, synthetic construct
  source 1..19: mol_type = other RNA
tcactaatcgatccactgt

SEQ ID NO: 121 - RNA, 19 nt, synthetic construct
  source 1..19: mol_type = other RNA
ncactaatcgatccactgt

SEQ ID NO: 122 - RNA, 19 nt, synthetic construct
  source 1..19: mol_type = other RNA
ncactaatcgatccactgn

SEQ ID NO: 123 - RNA, 19 nt, synthetic construct
  source 1..19: mol_type = other RNA
ttgacactaatcgatccac

SEQ ID NO: 124 - RNA, 19 nt, synthetic construct
  source 1..19: mol_type = other RNA
atgacactaatcgatccac

SEQ ID NO: 125 - RNA, 19 nt, synthetic construct
  source 1..19: mol_type = other RNA
ntgacactaatcgatccac

SEQ ID NO: 126 - RNA, 19 nt, synthetic construct
  source 1..19: mol_type = other RNA
ntgacactaatcgatccan

SEQ ID NO: 127 - RNA, 19 nt, synthetic construct
  source 1..19: mol_type = other RNA
ttgacactaatcgatccac

SEQ ID NO: 128 - RNA, 19 nt, synthetic construct
  source 1..19: mol_type = other RNA
atgacactaatcgatccac

SEQ ID NO: 129 - RNA, 19 nt, synthetic construct
  source 1..19: mol_type = other RNA
ntgacactaatcgatccac

SEQ ID NO: 130 - RNA, 19 nt, synthetic construct
  source 1..19: mol_type = other RNA
ntgacactaatcgatccan

SEQ ID NO: 131 - RNA, 19 nt, synthetic construct
  source 1..19: mol_type = other RNA
tcatcgaagtgagcatctc

SEQ ID NO: 132 - RNA, 19 nt, synthetic construct
  source 1..19: mol_type = other RNA
acatcgaagtgagcatctc

SEQ ID NO: 133 - RNA, 19 nt, synthetic construct
  source 1..19: mol_type = other RNA
ncatcgaagtgagcatctc

SEQ ID NO: 134 - RNA, 19 nt, synthetic construct
  source 1..19: mol_type = other RNA
ncatcgaagtgagcatctn

SEQ ID NO: 135 - RNA, 19 nt, synthetic construct
  source 1..19: mol_type = other RNA
tagcatacaggaagttaat

SEQ ID NO: 136 - RNA, 19 nt, synthetic construct
  source 1..19: mol_type = other RNA
aagcatacaggaagttaat

SEQ ID NO: 137 - RNA, 19 nt, synthetic construct
  source 1..19: mol_type = other RNA
nagcatacaggaagttaat

SEQ ID NO: 138 - RNA, 19 nt, synthetic construct
  source 1..19: mol_type = other RNA
nagcatacaggaagttaan

SEQ ID NO: 139 - RNA, 19 nt, synthetic construct
  source 1..19: mol_type = other RNA
ataggttggatacatcact

SEQ ID NO: 140 - RNA, 19 nt, synthetic construct
  source 1..19: mol_type = other RNA
ttaggttggatacatcact

SEQ ID NO: 141 - RNA, 19 nt, synthetic construct
  source 1..19: mol_type = other RNA
ntaggttggatacatcact

SEQ ID NO: 142 - RNA, 19 nt, synthetic construct
  source 1..19: mol_type = other RNA
ntaggttggatacatcacn

SEQ ID NO: 143 - RNA, 19 nt, synthetic construct
  source 1..19: mol_type = other RNA
atttccataggttggatac

SEQ ID NO: 144 - RNA, 19 nt, synthetic construct
  source 1..19: mol_type = other RNA
ttttccataggttggatac

SEQ ID NO: 145 - RNA, 19 nt, synthetic construct
  source 1..19: mol_type = other RNA
ntttccataggttggatac

SEQ ID NO: 146 - RNA, 19 nt, synthetic construct
  source 1..19: mol_type = other RNA
ntttccataggttggatan

SEQ ID NO: 147 - RNA, 19 nt, synthetic construct
  source 1..19: mol_type = other RNA
tatagtttctgaatgcctt

SEQ ID NO: 148 - RNA, 19 nt, synthetic construct
  source 1..19: mol_type = other RNA
aatagtttctgaatgcctt

SEQ ID NO: 149 - RNA, 19 nt, synthetic construct
  source 1..19: mol_type = other RNA
natagtttctgaatgcctt

SEQ ID NO: 150 - RNA, 19 nt, synthetic construct
  source 1..19: mol_type = other RNA
natagtttctgaatgcctn

SEQ ID NO: 151 - RNA, 19 nt, synthetic construct
  source 1..19: mol_type = other RNA
tcaattctgattgtgcaac

SEQ ID NO: 152 - RNA, 19 nt, synthetic construct
  source 1..19: mol_type = other RNA
acaattctgattgtgcaac

SEQ ID NO: 153 - RNA, 19 nt, synthetic construct
  source 1..19: mol_type = other RNA
ncaattctgattgtgcaac

SEQ ID NO: 154 - RNA, 19 nt, synthetic construct
  source 1..19: mol_type = other RNA
ncaattctgattgtgcaan

SEQ ID NO: 155 - RNA, 19 nt, synthetic construct
  source 1..19: mol_type = other RNA
atcaattctgattgtgcaa

SEQ ID NO: 156 - RNA, 19 nt, synthetic construct
  source 1..19: mol_type = other RNA
ttcaattctgattgtgcaa

SEQ ID NO: 157 - RNA, 19 nt, synthetic construct
  source 1..19: mol_type = other RNA
ntcaattctgattgtgcaa

SEQ ID NO: 158 - RNA, 19 nt, synthetic construct
  source 1..19: mol_type = other RNA
ntcaattctgattgtgcan

SEQ ID NO: 159 - RNA, 19 nt, synthetic construct
  source 1..19: mol_type = other RNA
tgcttatcaattctgattg

SEQ ID NO: 160 - RNA, 19 nt, synthetic construct
  source 1..19: mol_type = other RNA
agcttatcaattctgattg

SEQ ID NO: 161 - RNA, 19 nt, synthetic construct
  source 1..19: mol_type = other RNA
ngcttatcaattctgattg

SEQ ID NO: 162 - RNA, 19 nt, synthetic construct
  source 1..19: mol_type = other RNA
ngcttatcaattctgattn

SEQ ID NO: 163 - RNA, 19 nt, synthetic construct
  source 1..19: mol_type = other RNA
ttgcttatcaattctgatt

SEQ ID NO: 164 - RNA, 19 nt, synthetic construct
  source 1..19: mol_type = other RNA
atgcttatcaattctgatt

SEQ ID NO: 165 - RNA, 19 nt, synthetic construct
  source 1..19: mol_type = other RNA
ntgcttatcaattctgatt

SEQ ID NO: 166 - RNA, 19 nt, synthetic construct
  source 1..19: mol_type = other RNA
ntgcttatcaattctgatn

SEQ ID NO: 167 - RNA, 19 nt, synthetic construct
  source 1..19: mol_type = other RNA
tgcaataaaaaagggtgac

SEQ ID NO: 168 - RNA, 19 nt, synthetic construct
  source 1..19: mol_type = other RNA
agcaataaaaaagggtgac

SEQ ID NO: 169 - RNA, 19 nt, synthetic construct
  source 1..19: mol_type = other RNA
ngcaataaaaaagggtgac

SEQ ID NO: 170 - RNA, 19 nt, synthetic construct
  source 1..19: mol_type = other RNA
ngcaataaaaaagggtgan

SEQ ID NO: 171 - RNA, 19 nt, synthetic construct
  source 1..19: mol_type = other RNA
acattcaaaaaccaactgc

SEQ ID NO: 172 - RNA, 19 nt, synthetic construct
  source 1..19: mol_type = other RNA
tcattcaaaaaccaactgc

SEQ ID NO: 173 - RNA, 19 nt, synthetic construct
  source 1..19: mol_type = other RNA
ncattcaaaaaccaactgc

SEQ ID NO: 174 - RNA, 19 nt, synthetic construct
  source 1..19: mol_type = other RNA
ncattcaaaaaccaactgn

SEQ ID NO: 175 - RNA, 19 nt, synthetic construct
  source 1..19: mol_type = other RNA
agacattcaaaaaccaact

SEQ ID NO: 176 - RNA, 19 nt, synthetic construct
  source 1..19: mol_type = other RNA
tgacattcaaaaaccaact

SEQ ID NO: 177 - RNA, 19 nt, synthetic construct
  source 1..19: mol_type = other RNA
ngacattcaaaaaccaact

SEQ ID NO: 178 - RNA, 19 nt, synthetic construct
  source 1..19: mol_type = other RNA
ngacattcaaaaaccaacn

SEQ ID NO: 179 - RNA, 19 nt, synthetic construct
  source 1..19: mol_type = other RNA
aagacattcaaaaaccaac

SEQ ID NO: 180 - RNA, 19 nt, synthetic construct
  source 1..19: mol_type = other RNA
tagacattcaaaaaccaac

SEQ ID NO: 181 - RNA, 19 nt, synthetic construct
  source 1..19: mol_type = other RNA
nagacattcaaaaaccaac

SEQ ID NO: 182 - RNA, 19 nt, synthetic construct
  source 1..19: mol_type = other RNA
nagacattcaaaaaccaan

SEQ ID NO: 183 - RNA, 19 nt, synthetic construct
  source 1..19: mol_type = other RNA
agtttatccttaaaaggag

SEQ ID NO: 184 - RNA, 19 nt, synthetic construct
  source 1..19: mol_type = other RNA
tgtttatccttaaaaggag

SEQ ID NO: 185 - RNA, 19 nt, synthetic construct
  source 1..19: mol_type = other RNA
ngtttatccttaaaaggag

SEQ ID NO: 186 - RNA, 19 nt, synthetic construct
  source 1..19: mol_type = other RNA
ngtttatccttaaaaggan

SEQ ID NO: 187 - RNA, 19 nt, synthetic construct
  source 1..19: mol_type = other RNA
atgtggagtgccagatgtt

SEQ ID NO: 188 - RNA, 19 nt, synthetic construct
  source 1..19: mol_type = other RNA
atgtggagtgccagatgta

SEQ ID NO: 189 - RNA, 19 nt, synthetic construct
  source 1..19: mol_type = other RNA
atgtggagtgccagatgtn

SEQ ID NO: 190 - RNA, 19 nt, synthetic construct
  source 1..19: mol_type = other RNA
ntgtggagtgccagatgtn

SEQ ID NO: 191 - RNA, 19 nt, synthetic construct
  source 1..19: mol_type = other RNA
gtggagtgccagatgttga

SEQ ID NO: 192 - RNA, 19 nt, synthetic construct
  source 1..19: mol_type = other RNA
gtggagtgccagatgttgt

SEQ ID NO: 193 - RNA, 19 nt, synthetic construct
  source 1..19: mol_type = other RNA
gtggagtgccagatgttgc

SEQ ID NO: 194 - RNA, 19 nt, synthetic construct
  source 1..19: mol_type = other RNA
gtggagtgccagatgttgn

SEQ ID NO: 195 - RNA, 19 nt, synthetic construct
  source 1..19: mol_type = other RNA
ntggagtgccagatgttgn

SEQ ID NO: 196 - RNA, 19 nt, synthetic construct
  source 1..19: mol_type = other RNA
tggagtgccagatgttgca

SEQ ID NO: 197 - RNA, 19 nt, synthetic construct
  source 1..19: mol_type = other RNA
tggagtgccagatgttgct

SEQ ID NO: 198 - RNA, 19 nt, synthetic construct
  source 1..19: mol_type = other RNA
tggagtgccagatgttgcn

SEQ ID NO: 199 - RNA, 19 nt, synthetic construct
  source 1..19: mol_type = other RNA
nggagtgccagatgttgcn

SEQ ID NO: 200 - RNA, 19 nt, synthetic construct
  source 1..19: mol_type = other RNA
gagtgccagatgttgcaga

SEQ ID NO: 201 - RNA, 19 nt, synthetic construct
  source 1..19: mol_type = other RNA
gagtgccagatgttgcagt

SEQ ID NO: 202 - RNA, 19 nt, synthetic construct
  source 1..19: mol_type = other RNA
gagtgccagatgttgcagn

SEQ ID NO: 203 - RNA, 19 nt, synthetic construct
  source 1..19: mol_type = other RNA
nagtgccagatgttgcagn

SEQ ID NO: 204 - RNA, 19 nt, synthetic construct
  source 1..19: mol_type = other RNA
agtgccagatgttgcagaa

SEQ ID NO: 205 - RNA, 19 nt, synthetic construct
  source 1..19: mol_type = other RNA
agtgccagatgttgcagat

SEQ ID NO: 206 - RNA, 19 nt, synthetic construct
  source 1..19: mol_type = other RNA
agtgccagatgttgcagan

SEQ ID NO: 207 - RNA, 19 nt, synthetic construct
  source 1..19: mol_type = other RNA
ngtgccagatgttgcagan

SEQ ID NO: 208 - RNA, 19 nt, synthetic construct
  source 1..19: mol_type = other RNA
gtgccagatgttgcagaat

SEQ ID NO: 209 - RNA, 19 nt, synthetic construct
  source 1..19: mol_type = other RNA
gtgccagatgttgcagaaa

SEQ ID NO: 210 - RNA, 19 nt, synthetic construct
  source 1..19: mol_type = other RNA
gtgccagatgttgcagaan

SEQ ID NO: 211 - RNA, 19 nt, synthetic construct
  source 1..19: mol_type = other RNA
ntgccagatgttgcagaan

SEQ ID NO: 212 - RNA, 19 nt, synthetic construct
  source 1..19: mol_type = other RNA
tgccagatgttgcagaata

SEQ ID NO: 213 - RNA, 19 nt, synthetic construct
  source 1..19: mol_type = other RNA
tgccagatgttgcagaatt

SEQ ID NO: 214 - RNA, 19 nt, synthetic construct
  source 1..19: mol_type = other RNA
tgccagatgttgcagaatn

SEQ ID NO: 215 - RNA, 19 nt, synthetic construct
  source 1..19: mol_type = other RNA
ngccagatgttgcagaatn

SEQ ID NO: 216 - RNA, 19 nt, synthetic construct
  source 1..19: mol_type = other RNA
catttgatgggccaggaaa

SEQ ID NO: 217 - RNA, 19 nt, synthetic construct
  source 1..19: mol_type = other RNA
catttgatgggccaggaat

SEQ ID NO: 218 - RNA, 19 nt, synthetic construct
  source 1..19: mol_type = other RNA
catttgatgggccaggaan

SEQ ID NO: 219 - RNA, 19 nt, synthetic construct
  source 1..19: mol_type = other RNA
natttgatgggccaggaan

SEQ ID NO: 220 - RNA, 19 nt, synthetic construct
  source 1..19: mol_type = other RNA
tgatgggccaggaaacaca

SEQ ID NO: 221 - RNA, 19 nt, synthetic construct
  source 1..19: mol_type = other RNA
tgatgggccaggaaacact

SEQ ID NO: 222 - RNA, 19 nt, synthetic construct
  source 1..19: mol_type = other RNA
tgatgggccaggaaacacg

SEQ ID NO: 223 - RNA, 19 nt, synthetic construct
  source 1..19: mol_type = other RNA
tgatgggccaggaaacacn

SEQ ID NO: 224 - RNA, 19 nt, synthetic construct
  source 1..19: mol_type = other RNA
ngatgggccaggaaacacn

SEQ ID NO: 225 - RNA, 19 nt, synthetic construct
  source 1..19: mol_type = other RNA
ggctcaggactatctcaaa

SEQ ID NO: 226 - RNA, 19 nt, synthetic construct
  source 1..19: mol_type = other RNA
ggctcaggactatctcaat

SEQ ID NO: 227 - RNA, 19 nt, synthetic construct
  source 1..19: mol_type = other RNA
ggctcaggactatctcaag

SEQ ID NO: 228 - RNA, 19 nt, synthetic construct
  source 1..19: mol_type = other RNA
ggctcaggactatctcaan

SEQ ID NO: 229 - RNA, 19 nt, synthetic construct
  source 1..19: mol_type = other RNA
ngctcaggactatctcaan

SEQ ID NO: 230 - RNA, 19 nt, synthetic construct
  source 1..19: mol_type = other RNA
ctcaagagattttatctct

SEQ ID NO: 231 - RNA, 19 nt, synthetic construct
  source 1..19: mol_type = other RNA
ctcaagagattttatctca

SEQ ID NO: 232 - RNA, 19 nt, synthetic construct
  source 1..19: mol_type = other RNA
ctcaagagattttatctcn

SEQ ID NO: 233 - RNA, 19 nt, synthetic construct
  source 1..19: mol_type = other RNA
ntcaagagattttatctcn

SEQ ID NO: 234 - RNA, 19 nt, synthetic construct
  source 1..19: mol_type = other RNA
agagattttatctctatga

SEQ ID NO: 235 - RNA, 19 nt, synthetic construct
  source 1..19: mol_type = other RNA
agagattttatctctatgt

SEQ ID NO: 236 - RNA, 19 nt, synthetic construct
  source 1..19: mol_type = other RNA
agagattttatctctatgn

SEQ ID NO: 237 - RNA, 19 nt, synthetic construct
  source 1..19: mol_type = other RNA
ngagattttatctctatgn

SEQ ID NO: 238 - RNA, 19 nt, synthetic construct
  source 1..19: mol_type = other RNA
gattttatctctatgacta

SEQ ID NO: 239 - RNA, 19 nt, synthetic construct
  source 1..19: mol_type = other RNA
gattttatctctatgactt

SEQ ID NO: 240 - RNA, 19 nt, synthetic construct
  source 1..19: mol_type = other RNA
gattttatctctatgactc

SEQ ID NO: 241 - RNA, 19 nt, synthetic construct
  source 1..19: mol_type = other RNA
gattttatctctatgactn

SEQ ID NO: 242 - RNA, 19 nt, synthetic construct
  source 1..19: mol_type = other RNA
nattttatctctatgactn

SEQ ID NO: 243 - RNA, 19 nt, synthetic construct
  source 1..19: mol_type = other RNA
tgtggagtgccagatgtta

SEQ ID NO: 244 - RNA, 19 nt, synthetic construct
  source 1..19: mol_type = other RNA
tgtggagtgccagatgttt

SEQ ID NO: 245 - RNA, 19 nt, synthetic construct
  source 1..19: mol_type = other RNA
tgtggagtgccagatgttn

SEQ ID NO: 246 - RNA, 19 nt, synthetic construct
  source 1..19: mol_type = other RNA
ngtggagtgccagatgttn

SEQ ID NO: 247 - RNA, 19 nt, synthetic construct
  source 1..19: mol_type = other RNA
agtgccagatgttgcagaa

SEQ ID NO: 248 - RNA, 19 nt, synthetic construct
  source 1..19: mol_type = other RNA
agtgccagatgttgcagat

SEQ ID NO: 249 - RNA, 19 nt, synthetic construct
  source 1..19: mol_type = other RNA
agtgccagatgttgcagan

SEQ ID NO: 250 - RNA, 19 nt, synthetic construct
  source 1..19: mol_type = other RNA
ngtgccagatgttgcagan

SEQ ID NO: 251 - RNA, 19 nt, synthetic construct
  source 1..19: mol_type = other RNA
cagatgttgcagaatacta

SEQ ID NO: 252 - RNA, 19 nt, synthetic construct
  source 1..19: mol_type = other RNA
cagatgttgcagaatactt

SEQ ID NO: 253 - RNA, 19 nt, synthetic construct
  source 1..19: mol_type = other RNA
cagatgttgcagaatactc

SEQ ID NO: 254 - RNA, 19 nt, synthetic construct
  source 1..19: mol_type = other RNA
cagatgttgcagaatactn

SEQ ID NO: 255 - RNA, 19 nt, synthetic construct
  source 1..19: mol_type = other RNA
nagatgttgcagaatactn

SEQ ID NO: 256 - RNA, 19 nt, synthetic construct
  source 1..19: mol_type = other RNA
ttgcagaatactcactatt

SEQ ID NO: 257 - RNA, 19 nt, synthetic construct
  source 1..19: mol_type = other RNA
ttgcagaatactcactata

SEQ ID NO: 258 - RNA, 19 nt, synthetic construct
  source 1..19: mol_type = other RNA
ttgcagaatactcactatn

SEQ ID NO: 259 - RNA, 19 nt, synthetic construct
  source 1..19: mol_type = other RNA
ntgcagaatactcactatn

SEQ ID NO: 260 - RNA, 19 nt, synthetic construct
  source 1..19: mol_type = other RNA
tgcagaatactcactattt

SEQ ID NO: 261 - RNA, 19 nt, synthetic construct
  source 1..19: mol_type = other RNA
tgcagaatactcactatta

SEQ ID NO: 262 - RNA, 19 nt, synthetic construct
  source 1..19: mol_type = other RNA
tgcagaatactcactattn

SEQ ID NO: 263 - RNA, 19 nt, synthetic construct
  source 1..19: mol_type = other RNA
ngcagaatactcactattn

SEQ ID NO: 264 - RNA, 19 nt, synthetic construct
  source 1..19: mol_type = other RNA
tacagtggatcgattagta

SEQ ID NO: 265 - RNA, 19 nt, synthetic construct
  source 1..19: mol_type = other RNA
tacagtggatcgattagtt

SEQ ID NO: 266 - RNA, 19 nt, synthetic construct
  source 1..19: mol_type = other RNA
tacagtggatcgattagtg

SEQ ID NO: 267 - RNA, 19 nt, synthetic construct
  source 1..19: mol_type = other RNA
tacagtggatcgattagtn

SEQ ID NO: 268 - RNA, 19 nt, synthetic construct
  source 1..19: mol_type = other RNA
nacagtggatcgattagtn

SEQ ID NO: 269 - RNA, 19 nt, synthetic construct
  source 1..19: mol_type = other RNA
acagtggatcgattagtgt

SEQ ID NO: 270 - RNA, 19 nt, synthetic construct
  source 1..19: mol_type = other RNA
acagtggatcgattagtga

SEQ ID NO: 271 - RNA, 19 nt, synthetic construct
  source 1..19: mol_type = other RNA
acagtggatcgattagtgn

SEQ ID NO: 272 - RNA, 19 nt, synthetic construct
  source 1..19: mol_type = other RNA
ncagtggatcgattagtgn

SEQ ID NO: 273 - RNA, 19 nt, synthetic construct
  source 1..19: mol_type = other RNA
gtggatcgattagtgtcaa

SEQ ID NO: 274 - RNA, 19 nt, synthetic construct
  source 1..19: mol_type = other RNA
gtggatcgattagtgtcat

SEQ ID NO: 275 - RNA, 19 nt, synthetic construct
  source 1..19: mol_type = other RNA
gtggatcgattagtgtcan

SEQ ID NO: 276 - RNA, 19 nt, synthetic construct
  source 1..19: mol_type = other RNA
ntggatcgattagtgtcan

SEQ ID NO: 277 - RNA, 19 nt, synthetic construct
  source 1..19: mol_type = other RNA
gtggatcgattagtntcaa

SEQ ID NO: 278 - RNA, 19 nt, synthetic construct
  source 1..19: mol_type = other RNA
gtggatcgattagtntcat

SEQ ID NO: 279 - RNA, 19 nt, synthetic construct
  source 1..19: mol_type = other RNA
gtggatcgattagtntcan

SEQ ID NO: 280 - RNA, 19 nt, synthetic construct
  source 1..19: mol_type = other RNA
ntggatcgattagtntcan

SEQ ID NO: 281 - RNA, 19 nt, synthetic construct
  source 1..19: mol_type = other RNA
gagatgctcacttcgatga

SEQ ID NO: 282 - RNA, 19 nt, synthetic construct
  source 1..19: mol_type = other RNA
gagatgctcacttcgatgt

SEQ ID NO: 283 - RNA, 19 nt, synthetic construct
  source 1..19: mol_type = other RNA
gagatgctcacttcgatgn

SEQ ID NO: 284 - RNA, 19 nt, synthetic construct
  source 1..19: mol_type = other RNA
nagatgctcacttcgatgn

SEQ ID NO: 285 - RNA, 19 nt, synthetic construct
  source 1..19: mol_type = other RNA
attaacttcctgtatgcta

SEQ ID NO: 286 - RNA, 19 nt, synthetic construct
  source 1..19: mol_type = other RNA
attaacttcctgtatgctt

SEQ ID NO: 287 - RNA, 19 nt, synthetic construct
  source 1..19: mol_type = other RNA
attaacttcctgtatgctn

SEQ ID NO: 288 - RNA, 19 nt, synthetic construct
  source 1..19: mol_type = other RNA
nttaacttcctgtatgctn

SEQ ID NO: 289 - RNA, 19 nt, synthetic construct
  source 1..19: mol_type = other RNA
agtgatgtatccaacctat

SEQ ID NO: 290 - RNA, 19 nt, synthetic construct
  source 1..19: mol_type = other RNA
agtgatgtatccaacctaa

SEQ ID NO: 291 - RNA, 19 nt, synthetic construct
  source 1..19: mol_type = other RNA
agtgatgtatccaacctan

SEQ ID NO: 292 - RNA, 19 nt, synthetic construct
  source 1..19: mol_type = other RNA
ngtgatgtatccaacctan

SEQ ID NO: 293 - RNA, 19 nt, synthetic construct
  source 1..19: mol_type = other RNA
gtatccaacctatggaaat

SEQ ID NO: 294 - RNA, 19 nt, synthetic construct
  source 1..19: mol_type = other RNA
gtatccaacctatggaaaa

SEQ ID NO: 295 - RNA, 19 nt, synthetic construct
  source 1..19: mol_type = other RNA
gtatccaacctatggaaan

SEQ ID NO: 296 - RNA, 19 nt, synthetic construct
  source 1..19: mol_type = other RNA
ntatccaacctatggaaan

SEQ ID NO: 297 - RNA, 19 nt, synthetic construct
  source 1..19: mol_type = other RNA
aaggcattcagaaactata

SEQ ID NO: 298 - RNA, 19 nt, synthetic construct
  source 1..19: mol_type = other RNA
aaggcattcagaaactatt

SEQ ID NO: 299 - RNA, 19 nt, synthetic construct
  source 1..19: mol_type = other RNA
aaggcattcagaaactatn

SEQ ID NO: 300 - RNA, 19 nt, synthetic construct
  source 1..19: mol_type = other RNA
naggcattcagaaactatn

SEQ ID NO: 301 - RNA, 19 nt, synthetic construct
  source 1..19: mol_type = other RNA
gttgcacaatcagaattga

SEQ ID NO: 302 - RNA, 19 nt, synthetic construct
  source 1..19: mol_type = other RNA
gttgcacaatcagaattgt

SEQ ID NO: 303 - RNA, 19 nt, synthetic construct
  source 1..19: mol_type = other RNA
gttgcacaatcagaattgn

SEQ ID NO: 304 - RNA, 19 nt, synthetic construct
  source 1..19: mol_type = other RNA
nttgcacaatcagaattgn

SEQ ID NO: 305 - RNA, 19 nt, synthetic construct
  source 1..19: mol_type = other RNA
ttgcacaatcagaattgat

SEQ ID NO: 306 - RNA, 19 nt, synthetic construct
  source 1..19: mol_type = other RNA
ttgcacaatcagaattgaa

SEQ ID NO: 307 - RNA, 19 nt, synthetic construct
  source 1..19: mol_type = other RNA
ttgcacaatcagaattgan

SEQ ID NO: 308 - RNA, 19 nt, synthetic construct
  source 1..19: mol_type = other RNA
ntgcacaatcagaattgan

SEQ ID NO: 309 - RNA, 19 nt, synthetic construct
  source 1..19: mol_type = other RNA
caatcagaattgataagca

SEQ ID NO: 310 - RNA, 19 nt, synthetic construct
  source 1..19: mol_type = other RNA
caatcagaattgataagct

SEQ ID NO: 311 - RNA, 19 nt, synthetic construct
  source 1..19: mol_type = other RNA
caatcagaattgataagcn

SEQ ID NO: 312 - RNA, 19 nt, synthetic construct
  source 1..19: mol_type = other RNA
naatcagaattgataagcn

SEQ ID NO: 313 - RNA, 19 nt, synthetic construct
  source 1..19: mol_type = other RNA
aatcagaattgataagcaa

SEQ ID NO: 314 - RNA, 19 nt, synthetic construct
  source 1..19: mol_type = other RNA
aatcagaattgataagcat

SEQ ID NO: 315 - RNA, 19 nt, synthetic construct
  source 1..19: mol_type = other RNA
aatcagaattgataagcan

SEQ ID NO: 316 - RNA, 19 nt, synthetic construct
  source 1..19: mol_type = other RNA
natcagaattgataagcan

SEQ ID NO: 317 - RNA, 19 nt, synthetic construct
  source 1..19: mol_type = other RNA
gtcacccttttttattgca

SEQ ID NO: 318 - RNA, 19 nt, synthetic construct
  source 1..19: mol_type = other RNA
gtcacccttttttattgct

SEQ ID NO: 319 - RNA, 19 nt, synthetic construct
  source 1..19: mol_type = other RNA
gtcacccttttttattgcn

SEQ ID NO: 320 - RNA, 19 nt, synthetic construct
  source 1..19: mol_type = other RNA
ntcacccttttttattgcn

SEQ ID NO: 321 - RNA, 19 nt, synthetic construct
  source 1..19: mol_type = other RNA
gcagttggtttttgaatgt

SEQ ID NO: 322 - RNA, 19 nt, synthetic construct
  source 1..19: mol_type = other RNA
gcagttggtttttgaatga

SEQ ID NO: 323 - RNA, 19 nt, synthetic construct
  source 1..19: mol_type = other RNA
gcagttggtttttgaatgn

SEQ ID NO: 324 - RNA, 19 nt, synthetic construct
  source 1..19: mol_type = other RNA
ncagttggtttttgaatgn

SEQ ID NO: 325 - RNA, 19 nt, synthetic construct
  source 1..19: mol_type = other RNA
agttggtttttgaatgtct

SEQ ID NO: 326 - RNA, 19 nt, synthetic construct
  source 1..19: mol_type = other RNA
agttggtttttgaatgtca

SEQ ID NO: 327 - RNA, 19 nt, synthetic construct
  source 1..19: mol_type = other RNA
agttggtttttgaatgtcn

SEQ ID NO: 328 - RNA, 19 nt, synthetic construct
  source 1..19: mol_type = other RNA
ngttggtttttgaatgtcn

SEQ ID NO: 329 - RNA, 19 nt, synthetic construct
  source 1..19: mol_type = other RNA
gttggtttttgaatgtctt

SEQ ID NO: 330 - RNA, 19 nt, synthetic construct
  source 1..19: mol_type = other RNA
gttggtttttgaatgtcta

SEQ ID NO: 331 - RNA, 19 nt, synthetic construct
  source 1..19: mol_type = other RNA
gttggtttttgaatgtctn

SEQ ID NO: 332 - RNA, 19 nt, synthetic construct
  source 1..19: mol_type = other RNA
nttggtttttgaatgtctn

SEQ ID NO: 333 - RNA, 19 nt, synthetic construct
  source 1..19: mol_type = other RNA
ctccttttaaggataaact

SEQ ID NO: 334 - RNA, 19 nt, synthetic construct
  source 1..19: mol_type = other RNA
ctccttttaaggataaaca

SEQ ID NO: 335 - RNA, 19 nt, synthetic construct
  source 1..19: mol_type = other RNA
ctccttttaaggataaacn

SEQ ID NO: 336 - RNA, 19 nt, synthetic construct
  source 1..19: mol_type = other RNA
ntccttttaaggataaacn

SEQ ID NO: 337 - RNA, 21 nt, synthetic construct
  modified_base 1: mod_base = OTHER; note = 2'-O-methyladenosine
  modified_base 1^2: mod_base = OTHER; note = phosphorothioate linkage
  modified_base 2: mod_base = OTHER; note = 2'-fluoroadenosine
  modified_base 2^3: mod_base = OTHER; note = phosphorothioate linkage
  modified_base 3: mod_base = cm
  modified_base 3^4: mod_base = OTHER; note = phosphorothioate linkage
  modified_base 4: mod_base = OTHER; note = 2'-fluoroadenosine
  modified_base 5: mod_base = um
  modified_base 6: mod_base = OTHER; note = 2'-fluorocytidine
  modified_base 7: mod_base = um
  modified_base 8: mod_base = OTHER; note = 2'-fluoroguanosine
  modified_base 9: mod_base = gm
  modified_base 10: mod_base = OTHER; note = 2'-fluorocytidine
  modified_base 11: mod_base = OTHER; note = 2'-O-methyladenosine
  modified_base 12: mod_base = OTHER; note = 2'-fluorocytidine
  modified_base 13: mod_base = um
  modified_base 14: mod_base = OTHER; note = 2'-fluorocytidine
  modified_base 15: mod_base = cm
  modified_base 16: mod_base = OTHER; note = 2'-fluoroadenosine
  modified_base 17: mod_base = cm
  modified_base 18: mod_base = OTHER; note = 2'-fluoroadenosine
  modified_base 19: mod_base = um
  modified_base 20: mod_base = OTHER; note = 2'-fluorocytidine
  modified_base 20^21: mod_base = OTHER; note = phosphorothioate linkage
  modified_base 21: mod_base = um
  source 1..21: mol_type = other RNA
aacatctggcactccacatct

SEQ ID NO: 338 - RNA, 21 nt, synthetic construct
  modified_base 1: mod_base = OTHER; note = 2'-O-methyladenosine
  modified_base 1^2: mod_base = OTHER; note = phosphorothioate linkage
  modified_base 2: mod_base = OTHER; note = 2'-fluoroadenosine
  modified_base 2^3: mod_base = OTHER; note = phosphorothioate linkage
  modified_base 3: mod_base = cm
  modified_base 3^4: mod_base = OTHER; note = phosphorothioate linkage
  modified_base 4: mod_base = OTHER; note = 2'-fluoroadenosine
  modified_base 5: mod_base = um
  modified_base 6: mod_base = OTHER; note = 2'-fluorocytidine
  modified_base 7: mod_base = um
  modified_base 8: mod_base = OTHER; note = 2'-fluoroguanosine
  modified_base 9: mod_base = gm
  modified_base 10: mod_base = OTHER; note = 2'-fluorocytidine
  modified_base 11: mod_base = OTHER; note = 2'-O-methyladenosine
  modified_base 12: mod_base = OTHER; note = 2'-fluorocytidine
  modified_base 13: mod_base = um
  modified_base 14: mod_base = OTHER; note = 2'-fluorocytidine
  modified_base 15: mod_base = cm
  modified_base 16: mod_base = OTHER; note = 2'-fluoroadenosine
  modified_base 17: mod_base = cm
  modified_base 18: mod_base = OTHER; note = 2'-fluoroadenosine
  modified_base 19: mod_base = um
  modified_base 20: mod_base = OTHER; note = 2'-fluorocytidine
  modified_base 20^21: mod_base = OTHER; note = phosphorothioate linkage
  modified_base 21: mod_base = gm
  source 1..21: mol_type = other RNA
aacatctggcactccacatcg

SEQ ID NO: 339 - RNA, 21 nt, synthetic construct
  modified_base 1: mod_base = um
  modified_base 1^2: mod_base = OTHER; note = phosphorothioate linkage
  modified_base 2: mod_base = OTHER; note = 2'-fluorocytidine
  modified_base 2^3: mod_base = OTHER; note = phosphorothioate linkage
  modified_base 3: mod_base = OTHER; note = 2'-O-methyladenosine
  modified_base 3^4: mod_base = OTHER; note = phosphorothioate linkage
  modified_base 4: mod_base = OTHER; note = 2'-fluoroadenosine
  modified_base 5: mod_base = cm
  modified_base 6: mod_base = OTHER; note = 2'-fluoroadenosine
  modified_base 7: mod_base = um
  modified_base 8: mod_base = OTHER; note = 2'-fluorocytidine
  modified_base 9: mod_base = um
  modified_base 10: mod_base = OTHER; note = 2'-fluoroguanosine
  modified_base 11: mod_base = gm
  modified_base 12: mod_base = OTHER; note = 2'-fluorocytidine
  modified_base 13: mod_base = OTHER; note = 2'-O-methyladenosine
  modified_base 14: mod_base = OTHER; note = 2'-fluorocytidine
  modified_base 15: mod_base = um
  modified_base 16: mod_base = OTHER; note = 2'-fluorocytidine
  modified_base 17: mod_base = cm
  modified_base 18: mod_base = OTHER; note = 2'-fluoroadenosine
  modified_base 19: mod_base = cm
  modified_base 20: mod_base = OTHER; note = 2'-fluoroadenosine
  modified_base 20^21: mod_base = OTHER; note = phosphorothioate linkage
  modified_base 21: mod_base = um
  source 1..21: mol_type = other RNA
tcaacatctggcactccacat

SEQ ID NO: 340 - RNA, 21 nt, synthetic construct
  modified_base 1: mod_base = um
  modified_base 1^2: mod_base = OTHER; note = phosphorothioate linkage
  modified_base 2: mod_base = OTHER; note = 2'-fluorocytidine
  modified_base 2^3: mod_base = OTHER; note = phosphorothioate linkage
  modified_base 3: mod_base = OTHER; note = 2'-O-methyladenosine
  modified_base 3^4: mod_base = OTHER; note = phosphorothioate linkage
  modified_base 4: mod_base = OTHER; note = 2'-fluoroadenosine
  modified_base 5: mod_base = cm
  modified_base 6: mod_base = OTHER; note = 2'-fluoroadenosine
  modified_base 7: mod_base = um
  modified_base 8: mod_base = OTHER; note = 2'-fluorocytidine
  modified_base 9: mod_base = um
  modified_base 10: mod_base = OTHER; note = 2'-fluoroguanosine
  modified_base 11: mod_base = gm
  modified_base 12: mod_base = OTHER; note = 2'-fluorocytidine
  modified_base 13: mod_base = OTHER; note = 2'-O-methyladenosine
  modified_base 14: mod_base = OTHER; note = 2'-fluorocytidine
  modified_base 15: mod_base = um
  modified_base 16: mod_base = OTHER; note = 2'-fluorocytidine
  modified_base 17: mod_base = cm
  modified_base 18: mod_base = OTHER; note = 2'-fluoroadenosine
  modified_base 19: mod_base = cm
  modified_base 20: mod_base = OTHER; note = 2'-fluoroadenosine
  modified_base 20^21: mod_base = OTHER; note = phosphorothioate linkage
  modified_base 21: mod_base = gm
  source 1..21: mol_type = other RNA
tcaacatctggcactccacag

SEQ ID NO: 341 - RNA, 21 nt, synthetic construct
  modified_base 1: mod_base = um
  modified_base 1^2: mod_base = OTHER; note = phosphorothioate linkage
  modified_base 2: mod_base = OTHER; note = 2'-fluoroguanosine
  modified_base 2^3: mod_base = OTHER; note = phosphorothioate linkage
  modified_base 3: mod_base = cm
  modified_base 3^4: mod_base = OTHER; note = phosphorothioate linkage
  modified_base 4: mod_base = OTHER; note = 2'-fluoroadenosine
  modified_base 5: mod_base = OTHER; note = 2'-O-methyladenosine
  modified_base 6: mod_base = OTHER; note = 2'-fluorocytidine
  modified_base 7: mod_base = OTHER; note = 2'-O-methyladenosine
  modified_base 8: mod_base = OTHER; note = 2'-fluorouridine
  modified_base 9: mod_base = cm
  modified_base 10: mod_base = OTHER; note = 2'-fluorouridine
  modified_base 11: mod_base = gm
  modified_base 12: mod_base = OTHER; note = 2'-fluoroguanosine
  modified_base 13: mod_base = cm
  modified_base 14: mod_base = OTHER; note = 2'-fluoroadenosine
  modified_base 15: mod_base = cm
  modified_base 16: mod_base = OTHER; note = 2'-fluorouridine
  modified_base 17: mod_base = cm
  modified_base 18: mod_base = OTHER; note = 2'-fluorocytidine
  modified_base 19: mod_base = OTHER; note = 2'-O-methyladenosine
  modified_base 20: mod_base = OTHER; note = 2'-fluorocytidine
  modified_base 20^21: mod_base = OTHER; note = phosphorothioate linkage
  modified_base 21: mod_base = OTHER; note = 2'-O-methyladenosine
  source 1..21: mol_type = other RNA
tgcaacatctggcactccaca

SEQ ID NO: 342 - RNA, 21 nt, synthetic construct
  modified_base 1: mod_base = um
  modified_base 1^2: mod_base = OTHER; note = phosphorothioate linkage
  modified_base 2: mod_base = OTHER; note = 2'-fluoroguanosine
  modified_base 2^3: mod_base = OTHER; note = phosphorothioate linkage
  modified_base 3: mod_base = cm
  modified_base 3^4: mod_base = OTHER; note = phosphorothioate linkage
  modified_base 4: mod_base = OTHER; note = 2'-fluoroadenosine
  modified_base 5: mod_base = OTHER; note = 2'-O-methyladenosine
  modified_base 6: mod_base = OTHER; note = 2'-fluorocytidine
  modified_base 7: mod_base = OTHER; note = 2'-O-methyladenosine
  modified_base 8: mod_base = OTHER; note = 2'-fluorouridine
  modified_base 9: mod_base = cm
  modified_base 10: mod_base = OTHER; note = 2'-fluorouridine
  modified_base 11: mod_base = gm
  modified_base 12: mod_base = OTHER; note = 2'-fluoroguanosine
  modified_base 13: mod_base = cm
  modified_base 14: mod_base = OTHER; note = 2'-fluoroadenosine
  modified_base 15: mod_base = cm
  modified_base 16: mod_base = OTHER; note = 2'-fluorouridine
  modified_base 17: mod_base = cm
  modified_base 18: mod_base = OTHER; note = 2'-fluorocytidine
  modified_base 19: mod_base = OTHER; note = 2'-O-methyladenosine
  modified_base 20: mod_base = OTHER; note = 2'-fluorocytidine
  modified_base 20^21: mod_base = OTHER; note = phosphorothioate linkage
  modified_base 21: mod_base = gm
  source 1..21: mol_type = other RNA
tgcaacatctggcactccacg

SEQ ID NO: 343 - RNA, 21 nt, synthetic construct
  modified_base 1: mod_base = um
  modified_base 1^2: mod_base = OTHER; note = phosphorothioate linkage
  modified_base 2: mod_base = OTHER; note = 2'-fluorocytidine
  modified_base 2^3: mod_base = OTHER; note = phosphorothioate linkage
  modified_base 3: mod_base = um
  modified_base 3^4: mod_base = OTHER; note = phosphorothioate linkage
  modified_base 4: mod_base = OTHER; note = 2'-fluoroguanosine
  modified_base 5: mod_base = cm
  modified_base 6: mod_base = OTHER; note = 2'-fluoroadenosine
  modified_base 7: mod_base = OTHER; note = 2'-O-methyladenosine
  modified_base 8: mod_base = OTHER; note = 2'-fluorocytidine
  modified_base 9: mod_base = OTHER; note = 2'-O-methyladenosine
  modified_base 10: mod_base = OTHER; note = 2'-fluorouridine
  modified_base 11: mod_base = cm
  modified_base 12: mod_base = OTHER; note = 2'-fluorouridine
  modified_base 13: mod_base = gm
  modified_base 14: mod_base = OTHER; note = 2'-fluoroguanosine
  modified_base 15: mod_base = cm
  modified_base 16: mod_base = OTHER; note = 2'-fluoroadenosine
  modified_base 17: mod_base = cm
  modified_base 18: mod_base = OTHER; note = 2'-fluorouridine
  modified_base 19: mod_base = cm
  modified_base 20: mod_base = OTHER; note = 2'-fluorocytidine
  modified_base 20^21: mod_base = OTHER; note = phosphorothioate linkage
  modified_base 21: mod_base = OTHER; note = 2'-O-methyladenosine
  source 1..21: mol_type = other RNA
tctgcaacatctggcactcca

SEQ ID NO: 344 - RNA, 21 nt, synthetic construct
  modified_base 1: mod_base = um
  modified_base 1^2: mod_base = OTHER; note = phosphorothioate linkage
  modified_base 2: mod_base = OTHER; note = 2'-fluorocytidine
  modified_base 2^3: mod_base = OTHER; note = phosphorothioate linkage
  modified_base 3: mod_base = um
  modified_base 3^4: mod_base = OTHER; note = phosphorothioate linkage
  modified_base 4: mod_base = OTHER; note = 2'-fluoroguanosine
  modified_base 5: mod_base = cm
  modified_base 6: mod_base = OTHER; note = 2'-fluoroadenosine
  modified_base 7: mod_base = OTHER; note = 2'-O-methyladenosine
  modified_base 8: mod_base = OTHER; note = 2'-fluorocytidine
  modified_base 9: mod_base = OTHER; note = 2'-O-methyladenosine
  modified_base 10: mod_base = OTHER; note = 2'-fluorouridine
  modified_base 11: mod_base = cm
  modified_base 12: mod_base = OTHER; note = 2'-fluorouridine
  modified_base 13: mod_base = gm
  modified_base 14: mod_base = OTHER; note = 2'-fluoroguanosine
  modified_base 15: mod_base = cm
  modified_base 16: mod_base = OTHER; note = 2'-fluoroadenosine
  modified_base 17: mod_base = cm
  modified_base 18: mod_base = OTHER; note = 2'-fluorouridine
  modified_base 19: mod_base = cm
  modified_base 20: mod_base = OTHER; note = 2'-fluorocytidine
  modified_base 20^21: mod_base = OTHER; note = phosphorothioate linkage
  modified_base 21: mod_base = gm
  source 1..21: mol_type = other RNA
tctgcaacatctggcactccg

SEQ ID NO: 345 - RNA, 21 nt, synthetic construct
  modified_base 1: mod_base = um
  modified_base 1^2: mod_base = OTHER; note = phosphorothioate linkage
  modified_base 2: mod_base = OTHER; note = 2'-fluorouridine
  modified_base 2^3: mod_base = OTHER; note = phosphorothioate linkage
  modified_base 3: mod_base = cm
  modified_base 3^4: mod_base = OTHER; note = phosphorothioate linkage
  modified_base 4: mod_base = OTHER; note = 2'-fluorouridine
  modified_base 5: mod_base = gm
  modified_base 6: mod_base = OTHER; note = 2'-fluorocytidine
  modified_base 7: mod_base = OTHER; note = 2'-O-methyladenosine
  modified_base 8: mod_base = OTHER; note = 2'-fluoroadenosine
  modified_base 9: mod_base = cm
  modified_base 10: mod_base = OTHER; note = 2'-fluoroadenosine
  modified_base 11: mod_base = um
  modified_base 12: mod_base = OTHER; note = 2'-fluorocytidine
  modified_base 13: mod_base = um
  modified_base 14: mod_base = OTHER; note = 2'-fluoroguanosine
  modified_base 15: mod_base = gm
  modified_base 16: mod_base = OTHER; note = 2'-fluorocytidine
  modified_base 17: mod_base = OTHER; note = 2'-O-methyladenosine
  modified_base 18: mod_base = OTHER; note = 2'-fluorocytidine
  modified_base 19: mod_base = um
  modified_base 20: mod_base = OTHER; note = 2'-fluorocytidine
  modified_base 20^21: mod_base = OTHER; note = phosphorothioate linkage
  modified_base 21: mod_base = cm
  source 1..21: mol_type = other RNA
ttctgcaacatctggcactcc

SEQ ID NO: 346 - RNA, 21 nt, synthetic construct
  modified_base 1: mod_base = OTHER; note = 2'-O-methyladenosine
  modified_base 1^2: mod_base = OTHER; note = phosphorothioate linkage
  modified_base 2: mod_base = OTHER; note = 2'-fluorouridine
  modified_base 2^3: mod_base = OTHER; note = phosphorothioate linkage
  modified_base 3: mod_base = um
  modified_base 3^4: mod_base = OTHER; note = phosphorothioate linkage
  modified_base 4: mod_base = OTHER; note = 2'-fluorocytidine
  modified_base 5: mod_base = um
  modified_base 6: mod_base = OTHER; note = 2'-fluoroguanosine
  modified_base 7: mod_base = cm
  modified_base 8: mod_base = OTHER; note = 2'-fluoroadenosine
  modified_base 9: mod_base = OTHER; note = 2'-O-methyladenosine
  modified_base 10: mod_base = OTHER; note = 2'-fluorocytidine
  modified_base 11: mod_base = OTHER; note = 2'-O-methyladenosine
  modified_base 12: mod_base = OTHER; note = 2'-fluorouridine
  modified_base 13: mod_base = cm
  modified_base 14: mod_base = OTHER; note = 2'-fluorouridine
  modified_base 15: mod_base = gm
  modified_base 16: mod_base = OTHER; note = 2'-fluoroguanosine
  modified_base 17: mod_base = cm
  modified_base 18: mod_base = OTHER; note = 2'-fluoroadenosine
  modified_base 19: mod_base = cm
  modified_base 20: mod_base = OTHER; note = 2'-fluorouridine
  modified_base 20^21: mod_base = OTHER; note = phosphorothioate linkage
  modified_base 21: mod_base = cm
  source 1..21: mol_type = other RNA
attctgcaacatctggcactc

SEQ ID NO: 347 - RNA, 21 nt, synthetic construct
  modified_base 1: mod_base = um
  modified_base 1^2: mod_base = OTHER; note = phosphorothioate linkage
  modified_base 2: mod_base = OTHER; note = 2'-fluoroadenosine
  modified_base 2^3: mod_base = OTHER; note = phosphorothioate linkage
  modified_base 3: mod_base = um
  modified_base 3^4: mod_base = OTHER; note = phosphorothioate linkage
  modified_base 4: mod_base = OTHER; note = 2'-fluorouridine
  modified_base 5: mod_base = cm
  modified_base 6: mod_base = OTHER; note = 2'-fluorouridine
  modified_base 7: mod_base = gm
  modified_base 8: mod_base = OTHER; note = 2'-fluorocytidine
  modified_base 9: mod_base = OTHER; note = 2'-O-methyladenosine
  modified_base 10: mod_base = OTHER; note = 2'-fluoroadenosine
  modified_base 11: mod_base = cm
  modified_base 12: mod_base = OTHER; note = 2'-fluoroadenosine
  modified_base 13: mod_base = um
  modified_base 14: mod_base = OTHER; note = 2'-fluorocytidine
  modified_base 15: mod_base = um
  modified_base 16: mod_base = OTHER; note = 2'-fluoroguanosine
  modified_base 17: mod_base = gm
  modified_base 18: mod_base = OTHER; note = 2'-fluorocytidine
  modified_base 19: mod_base = OTHER; note = 2'-O-methyladenosine
  modified_base 20: mod_base = OTHER; note = 2'-fluorocytidine
  modified_base 20^21: mod_base = OTHER; note = phosphorothioate linkage
  modified_base 21: mod_base = um
  source 1..21: mol_type = other RNA
tattctgcaacatctggcact

SEQ ID NO: 348 - RNA, 21 nt, synthetic construct
  modified_base 1: mod_base = um
  modified_base 1^2: mod_base = OTHER; note = phosphorothioate linkage
  modified_base 2: mod_base = OTHER; note = 2'-fluoroadenosine
  modified_base 2^3: mod_base = OTHER; note = phosphorothioate linkage
  modified_base 3: mod_base = um
  modified_base 3^4: mod_base = OTHER; note = phosphorothioate linkage
  modified_base 4: mod_base = OTHER; note = 2'-fluorouridine
  modified_base 5: mod_base = cm
  modified_base 6: mod_base = OTHER; note = 2'-fluorouridine
  modified_base 7: mod_base = gm
  modified_base 8: mod_base = OTHER; note = 2'-fluorocytidine
  modified_base 9: mod_base = OTHER; note = 2'-O-methyladenosine
  modified_base 10: mod_base = OTHER; note = 2'-fluoroadenosine
  modified_base 11: mod_base = cm
  modified_base 12: mod_base = OTHER; note = 2'-fluoroadenosine
  modified_base 13: mod_base = um
  modified_base 14: mod_base = OTHER; note = 2'-fluorocytidine
  modified_base 15: mod_base = um
  modified_base 16: mod_base = OTHER; note = 2'-fluoroguanosine
  modified_base 17: mod_base = gm
  modified_base 18: mod_base = OTHER; note = 2'-fluorocytidine
  modified_base 19: mod_base = OTHER; note = 2'-O-methyladenosine
  modified_base 20: mod_base = OTHER; note = 2'-fluorocytidine
  modified_base 20^21: mod_base = OTHER; note = phosphorothioate linkage
  modified_base 21: mod_base = gm
  source 1..21: mol_type = other RNA
tattctgcaacatctggcacg

SEQ ID NO: 349 - RNA, 21 nt, synthetic construct
  modified_base 1: mod_base = um
  modified_base 1^2: mod_base = OTHER; note = phosphorothioate linkage
  modified_base 2: mod_base = OTHER; note = 2'-fluorouridine
  modified_base 2^3: mod_base = OTHER; note = phosphorothioate linkage
  modified_base 3: mod_base = um
  modified_base 3^4: mod_base = OTHER; note = phosphorothioate linkage
  modified_base 4: mod_base = OTHER; note = 2'-fluorocytidine
  modified_base 5: mod_base = cm
  modified_base 6: mod_base = OTHER; note = 2'-fluorouridine
  modified_base 7: mod_base = gm
  modified_base 8: mod_base = OTHER; note = 2'-fluoroguanosine
  modified_base 9: mod_base = cm
  modified_base 10: mod_base = OTHER; note = 2'-fluorocytidine
  modified_base 11: mod_base = cm
  modified_base 12: mod_base = OTHER; note = 2'-fluoroadenosine
  modified_base 13: mod_base = um
  modified_base 14: mod_base = OTHER; note = 2'-fluorocytidine
  modified_base 15: mod_base = OTHER; note = 2'-O-methyladenosine
  modified_base 16: mod_base = OTHER; note = 2'-fluoroadenosine
  modified_base 17: mod_base = OTHER; note = 2'-O-methyladenosine
  modified_base 18: mod_base = OTHER; note = 2'-fluorouridine
  modified_base 19: mod_base = gm
  modified_base 20: mod_base = OTHER; note = 2'-fluoroguanosine
  modified_base 20^21: mod_base = OTHER; note = phosphorothioate linkage
  modified_base 21: mod_base = gm
  source 1..21: mol_type = other RNA
tttcctggcccatcaaatggg

SEQ ID NO: 350 - RNA, 21 nt, synthetic construct
  modified_base 1: mod_base = um
  modified_base 1^2: mod_base = OTHER; note = phosphorothioate linkage
  modified_base 2: mod_base = OTHER; note = 2'-fluoroguanosine
  modified_base 2^3: mod_base = OTHER; note = phosphorothioate linkage
  modified_base 3: mod_base = um
  modified_base 3^4: mod_base = OTHER; note = phosphorothioate linkage
  modified_base 4: mod_base = OTHER; note = 2'-fluoroguanosine
  modified_base 5: mod_base = um
  modified_base 6: mod_base = OTHER; note = 2'-fluorouridine
  modified_base 7: mod_base = um
  modified_base 8: mod_base = OTHER; note = 2'-fluorocytidine
  modified_base 9: mod_base = cm
  modified_base 10: mod_base = OTHER; note = 2'-fluorouridine
  modified_base 11: mod_base = gm
  modified_base 12: mod_base = OTHER; note = 2'-fluoroguanosine
  modified_base 13: mod_base = cm
  modified_base 14: mod_base = OTHER; note = 2'-fluorocytidine
  modified_base 15: mod_base = cm
  modified_base 16: mod_base = OTHER; note = 2'-fluoroadenosine
  modified_base 17: mod_base = um
  modified_base 18: mod_base = OTHER; note = 2'-fluorocytidine
  modified_base 19: mod_base = OTHER; note = 2'-O-methyladenosine
  modified_base 20: mod_base = OTHER; note = 2'-fluoroadenosine
  modified_base 20^21: mod_base = OTHER; note = phosphorothioate linkage
  modified_base 21: mod_base = gm
  source 1..21: mol_type = other RNA
tgtgtttcctggcccatcaag

SEQ ID NO: 351 - RNA, 21 nt, synthetic construct
  modified_base 1: mod_base = um
  modified_base 1^2: mod_base = OTHER; note = phosphorothioate linkage
  modified_base 2: mod_base = OTHER; note = 2'-fluorocytidine
  modified_base 2^3: mod_base = OTHER; note = phosphorothioate linkage
  modified_base 3: mod_base = um
  modified_base 3^4: mod_base = OTHER; note = phosphorothioate linkage
  modified_base 4: mod_base = OTHER; note = 2'-fluorouridine
  modified_base 5: mod_base = cm
  modified_base 6: mod_base = OTHER; note = 2'-fluorouridine
  modified_base 7: mod_base = um
  modified_base 8: mod_base = OTHER; note = 2'-fluorouridine
  modified_base 9: mod_base = gm
  modified_base 10: mod_base = OTHER; note = 2'-fluorouridine
  modified_base 11: mod_base = um
  modified_base 12: mod_base = OTHER; note = 2'-fluorouridine
  modified_base 13: mod_base = um
  modified_base 14: mod_base = OTHER; note = 2'-fluoroadenosine
  modified_base 15: mod_base = gm
  modified_base 16: mod_base = OTHER; note = 2'-fluoroadenosine
  modified_base 17: mod_base = gm
  modified_base 18: mod_base = OTHER; note = 2'-fluorouridine
  modified_base 19: mod_base = cm
  modified_base 20: mod_base = OTHER; note = 2'-fluoroguanosine
  modified_base 20^21: mod_base = OTHER; note = phosphorothioate linkage
  modified_base 21: mod_base = um
  source 1..21: mol_type = other RNA
tcttctttgttttagagtcgt

SEQ ID NO: 352 - RNA, 21 nt, synthetic construct
  modified_base 1: mod_base = OTHER; note = 2'-O-methyladenosine
  modified_base 1^2: mod_base = OTHER; note = phosphorothioate linkage
  modified_base 2: mod_base = OTHER; note = 2'-fluoroadenosine
  modified_base 2^3: mod_base = OTHER; note = phosphorothioate linkage
  modified_base 3: mod_base = gm
  modified_base 3^4: mod_base = OTHER; note = phosphorothioate linkage
  modified_base 4: mod_base = OTHER; note = 2'-fluoroadenosine
  modified_base 5: mod_base = OTHER; note = 2'-O-methyladenosine
  modified_base 6: mod_base = OTHER; note = 2'-fluorocytidine
  modified_base 7: mod_base = um
  modified_base 8: mod_base = OTHER; note = 2'-fluorouridine
  modified_base 9: mod_base = cm
  modified_base 10: mod_base = OTHER; note = 2'-fluorouridine
  modified_base 11: mod_base = gm
  modified_base 12: mod_base = OTHER; note = 2'-fluorocytidine
  modified_base 13: mod_base = OTHER; note = 2'-O-methyladenosine
  modified_base 14: mod_base = OTHER; note = 2'-fluorouridine
  modified_base 15: mod_base = um
  modified_base 16: mod_base = OTHER; note = 2'-fluorouridine
  modified_base 17: mod_base = cm
  modified_base 18: mod_base = OTHER; note = 2'-fluorocytidine
  modified_base 19: mod_base = cm
  modified_base 20: mod_base = OTHER; note = 2'-fluorouridine
  modified_base 20^21: mod_base = OTHER; note = phosphorothioate linkage
  modified_base 21: mod_base = cm
  source 1..21: mol_type = other RNA
aagaacttctgcatttccctc

SEQ ID NO: 353 - RNA, 21 nt, synthetic construct
  modified_base 1: mod_base = um
  modified_base 1^2: mod_base = OTHER; note = phosphorothioate linkage
  modified_base 2: mod_base = OTHER; note = 2'-fluorouridine
  modified_base 2^3: mod_base = OTHER; note = phosphorothioate linkage
  modified_base 3: mod_base = gm
  modified_base 3^4: mod_base = OTHER; note = phosphorothioate linkage
  modified_base 4: mod_base = OTHER; note = 2'-fluoroadenosine
  modified_base 5: mod_base = um
  modified_base 6: mod_base = OTHER; note = 2'-fluorocytidine
  modified_base 7: mod_base = um
  modified_base 8: mod_base = OTHER; note = 2'-fluoroadenosine
  modified_base 9: mod_base = cm
  modified_base 10: mod_base = OTHER; note = 2'-fluorouridine
  modified_base 11: mod_base = OTHER; note = 2'-O-methyladenosine
  modified_base 12: mod_base = OTHER; note = 2'-fluoroadenosine
  modified_base 13: mod_base = gm
  modified_base 14: mod_base = OTHER; note = 2'-fluoroadenosine
  modified_base 15: mod_base = OTHER; note = 2'-O-methyladenosine
  modified_base 16: mod_base = OTHER; note = 2'-fluorocytidine
  modified_base 17: mod_base = cm
  modified_base 18: mod_base = OTHER; note = 2'-fluoroguanosine
  modified_base 19: mod_base = OTHER; note = 2'-O-methyladenosine
  modified_base 20: mod_base = OTHER; note = 2'-fluoroguanosine
  modified_base 20^21: mod_base = OTHER; note = phosphorothioate linkage
  modified_base 21: mod_base = gm
  source 1..21: mol_type = other RNA
ttgatctactaagaaccgagg

SEQ ID NO: 354 - RNA, 21 nt, synthetic construct
  modified_base 1: mod_base = OTHER; note = 2'-O-methyladenosine
  modified_base 1^2: mod_base = OTHER; note = phosphorothioate linkage
  modified_base 2: mod_base = OTHER; note = 2'-fluorocytidine
  modified_base 2^3: mod_base = OTHER; note = phosphorothioate linkage
  modified_base 3: mod_base = OTHER; note = 2'-O-methyladenosine
  modified_base 3^4: mod_base = OTHER; note = phosphorothioate linkage
  modified_base 4: mod_base = OTHER; note = 2'-fluoroadenosine
  modified_base 5: mod_base = OTHER; note = 2'-O-methyladenosine
  modified_base 6: mod_base = OTHER; note = 2'-fluorocytidine
  modified_base 7: mod_base = OTHER; note = 2'-O-methyladenosine
  modified_base 8: mod_base = OTHER; note = 2'-fluoroguanosine
  modified_base 9: mod_base = gm
  modified_base 10: mod_base = OTHER; note = 2'-fluoroadenosine
  modified_base 11: mod_base = OTHER; note = 2'-O-methyladenosine
  modified_base 12: mod_base = OTHER; note = 2'-fluoroguanosine
  modified_base 13: mod_base = um
  modified_base 14: mod_base = OTHER; note = 2'-fluorouridine
  modified_base 15: mod_base = cm
  modified_base 16: mod_base = OTHER; note = 2'-fluoroadenosine
  modified_base 17: mod_base = cm
  modified_base 18: mod_base = OTHER; note = 2'-fluorouridine
  modified_base 19: mod_base = cm
  modified_base 20: mod_base = OTHER; note = 2'-fluorocytidine
  modified_base 20^21: mod_base = OTHER; note = phosphorothioate linkage
  modified_base 21: mod_base = um
  source 1..21: mol_type = other RNA
acaaacaggaagttcactcct

SEQ ID NO: 355 - RNA, 21 nt, synthetic construct
  modified_base 1: mod_base = um
  modified_base 1^2: mod_base = OTHER; note = phosphorothioate linkage
  modified_base 2: mod_base = OTHER; note = 2'-fluoroadenosine
  modified_base 2^3: mod_base = OTHER; note = phosphorothioate linkage
  modified_base 3: mod_base = cm
  modified_base 3^4: mod_base = OTHER; note = phosphorothioate linkage
  modified_base 4: mod_base = OTHER; note = 2'-fluoroadenosine
  modified_base 5: mod_base = gm
  modified_base 6: mod_base = OTHER; note = 2'-fluorouridine
  modified_base 7: mod_base = OTHER; note = 2'-O-methyladenosine
  modified_base 8: mod_base = OTHER; note = 2'-fluorocytidine
  modified_base 9: mod_base = OTHER; note = 2'-O-methyladenosine
  modified_base 10: mod_base = OTHER; note = 2'-fluoroadenosine
  modified_base 11: mod_base = gm
  modified_base 12: mod_base = OTHER; note = 2'-fluoroguanosine
  modified_base 13: mod_base = OTHER; note = 2'-O-methyladenosine
  modified_base 14: mod_base = OTHER; note = 2'-fluoroadenosine
  modified_base 15: mod_base = gm
  modified_base 16: mod_base = OTHER; note = 2'-fluoroadenosine
  modified_base 17: mod_base = OTHER; note = 2'-O-methyladenosine
  modified_base 18: mod_base = OTHER; note = 2'-fluoroadenosine
  modified_base 19: mod_base = gm
  modified_base 20: mod_base = OTHER; note = 2'-fluoroguanosine
  modified_base 20^21: mod_base = OTHER; note = phosphorothioate linkage
  modified_base 21: mod_base = OTHER; note = 2'-O-methyladenosine
  source 1..21: mol_type = other RNA
tacagtacaaggaagaaagga

SEQ ID NO: 356 - RNA, 21 nt, synthetic construct
  modified_base 1: mod_base = um
  modified_base 1^2: mod_base = OTHER; note = phosphorothioate linkage
  modified_base 2: mod_base = OTHER; note = 2'-fluoroguanosine
  modified_base 2^3: mod_base = OTHER; note = phosphorothioate linkage
  modified_base 3: mod_base = OTHER; note = 2'-O-methyladenosine
  modified_base 3^4: mod_base = OTHER; note = phosphorothioate linkage
  modified_base 4: mod_base = OTHER; note = 2'-fluorocytidine
  modified_base 5: mod_base = OTHER; note = 2'-O-methyladenosine
  modified_base 6: mod_base = OTHER; note = 2'-fluorouridine
  modified_base 7: mod_base = um
  modified_base 8: mod_base = OTHER; note = 2'-fluorouridine
  modified_base 9: mod_base = OTHER; note = 2'-O-methyladenosine
  modified_base 10: mod_base = OTHER; note = 2'-fluorouridine
  modified_base 11: mod_base = um
  modified_base 12: mod_base = OTHER; note = 2'-fluoroguanosine
  modified_base 13: mod_base = cm
  modified_base 14: mod_base = OTHER; note = 2'-fluorouridine
  modified_base 15: mod_base = gm
  modified_base 16: mod_base = OTHER; note = 2'-fluoroguanosine
  modified_base 17: mod_base = um
  modified_base 18: mod_base = OTHER; note = 2'-fluoroguanosine
  modified_base 19: mod_base = um
  modified_base 20: mod_base = OTHER; note = 2'-fluorocytidine
  modified_base 20^21: mod_base = OTHER; note = phosphorothioate linkage
  modified_base 21: mod_base = um
  source 1..21: mol_type = other RNA
tgacatttattgctggtgtct

SEQ ID NO: 357 - RNA, 21 nt, synthetic construct
  modified_base 1: mod_base = um
  modified_base 1^2: mod_base = OTHER; note = phosphorothioate linkage
  modified_base 2: mod_base = OTHER; note = 2'-fluoroguanosine
  modified_base 2^3: mod_base = OTHER; note = phosphorothioate linkage
  modified_base 3: mod_base = OTHER; note = 2'-O-methyladenosine
  modified_base 3^4: mod_base = OTHER; note = phosphorothioate linkage
  modified_base 4: mod_base = OTHER; note = 2'-fluorocytidine
  modified_base 5: mod_base = OTHER; note = 2'-O-methyladenosine
  modified_base 6: mod_base = OTHER; note = 2'-fluorouridine
  modified_base 7: mod_base = um
  modified_base 8: mod_base = OTHER; note = 2'-fluorouridine
  modified_base 9: mod_base = OTHER; note = 2'-O-methyladenosine
  modified_base 10: mod_base = OTHER; note = 2'-fluorouridine
  modified_base 11: mod_base = um
  modified_base 12: mod_base = OTHER; note = 2'-fluoroguanosine
  modified_base 13: mod_base = cm
  modified_base 14: mod_base = OTHER; note = 2'-fluorouridine
  modified_base 15: mod_base = gm
  modified_base 16: mod_base = OTHER; note = 2'-fluoroguanosine
  modified_base 17: mod_base = um
  modified_base 18: mod_base = OTHER; note = 2'-fluoroguanosine
  modified_base 19: mod_base = um
  modified_base 20: mod_base = OTHER; note = 2'-fluorocytidine
  modified_base 20^21: mod_base = OTHER; note = phosphorothioate linkage
  modified_base 21: mod_base = gm
  source 1..21: mol_type = other RNA
tgacatttattgctggtgtcg

SEQ ID NO: 358 - RNA, 21 nt, synthetic construct
  modified_base 1: mod_base = um
  modified_base 1^2: mod_base = OTHER; note = phosphorothioate linkage
  modified_base 2: mod_base = OTHER; note = 2'-fluoroguanosine
  modified_base 2^3: mod_base = OTHER; note = phosphorothioate linkage
  modified_base 3: mod_base = OTHER; note = 2'-O-methyladenosine
  modified_base 3^4: mod_base = OTHER; note = phosphorothioate linkage
  modified_base 4: mod_base = OTHER; note = 2'-fluorocytidine
  modified_base 5: mod_base = OTHER; note = 2'-O-methyladenosine
  modified_base 6: mod_base = OTHER; note = 2'-fluorouridine
  modified_base 7: mod_base = um
  modified_base 8: mod_base = OTHER; note = 2'-fluorouridine
  modified_base 9: mod_base = OTHER; note = 2'-O-methyladenosine
  modified_base 10: mod_base = OTHER; note = 2'-fluorouridine
  modified_base 11: mod_base = um
  modified_base 12: mod_base = OTHER; note = 2'-fluoroguanosine
  modified_base 13: mod_base = cm
  modified_base 14: mod_base = OTHER; note = 2'-fluorouridine
  modified_base 15: mod_base = gm
  modified_base 16: mod_base = OTHER; note = 2'-fluoroadenosine
  modified_base 17: mod_base = um
  modified_base 18: mod_base = OTHER; note = 2'-fluoroguanosine
  modified_base 19: mod_base = um
  modified_base 20: mod_base = OTHER; note = 2'-fluorocytidine
  modified_base 20^21: mod_base = OTHER; note = phosphorothioate linkage
  modified_base 21: mod_base = gm
  source 1..21: mol_type = other RNA
tgacatttattgctgatgtcg

SEQ ID NO: 359 - RNA, 21 nt, synthetic construct
  modified_base 1: mod_base = um
  modified_base 1^2: mod_base = OTHER; note = phosphorothioate linkage
  modified_base 2: mod_base = OTHER; note = 2'-fluorouridine
  modified_base 2^3: mod_base = OTHER; note = phosphorothioate linkage
  modified_base 3: mod_base = um
  modified_base 3^4: mod_base = OTHER; note = phosphorothioate linkage
  modified_base 4: mod_base = OTHER; note = 2'-fluoroguanosine
  modified_base 5: mod_base = OTHER; note = 2'-O-methyladenosine
  modified_base 6: mod_base = OTHER; note = 2'-fluoroguanosine
  modified_base 7: mod_base = OTHER; note = 2'-O-methyladenosine
  modified_base 8: mod_base = OTHER; note = 2'-fluorouridine
  modified_base 9: mod_base = OTHER; note = 2'-O-methyladenosine
  modified_base 10: mod_base = OTHER; note = 2'-fluoroguanosine
  modified_base 11: mod_base = um
  modified_base 12: mod_base = OTHER; note = 2'-fluorocytidine
  modified_base 13: mod_base = cm
  modified_base 14: mod_base = OTHER; note = 2'-fluorouridine
  modified_base 15: mod_base = gm
  modified_base 16: mod_base = OTHER; note = 2'-fluoroadenosine
  modified_base 17: mod_base = gm
  modified_base 18: mod_base = OTHER; note = 2'-fluorocytidine
  modified_base 19: mod_base = cm
  modified_base 20: mod_base = OTHER; note = 2'-fluorouridine
  modified_base 20^21: mod_base = OTHER; note = phosphorothioate linkage
  modified_base 21: mod_base = gm
  source 1..21: mol_type = other RNA
tttgagatagtcctgagcctg

SEQ ID NO: 360 - RNA, 21 nt, synthetic construct
  modified_base 1: mod_base = OTHER; note = 2'-O-methyladenosine
  modified_base 1^2: mod_base = OTHER; note = phosphorothioate linkage
  modified_base 2: mod_base = OTHER; note = 2'-fluoroguanosine
  modified_base 2^3: mod_base = OTHER; note = phosphorothioate linkage
  modified_base 3: mod_base = OTHER; note = 2'-O-methyladenosine
  modified_base 3^4: mod_base = OTHER; note = phosphorothioate linkage
  modified_base 4: mod_base = OTHER; note = 2'-fluoroguanosine
  modified_base 5: mod_base = OTHER; note = 2'-O-methyladenosine
  modified_base 6: mod_base = OTHER; note = 2'-fluorouridine
  modified_base 7: mod_base = OTHER; note = 2'-O-methyladenosine
  modified_base 8: mod_base = OTHER; note = 2'-fluoroadenosine
  modified_base 9: mod_base = OTHER; note = 2'-O-methyladenosine
  modified_base 10: mod_base = OTHER; note = 2'-fluoroadenosine
  modified_base 11: mod_base = um
  modified_base 12: mod_base = OTHER; note = 2'-fluorocytidine
  modified_base 13: mod_base = um
  modified_base 14: mod_base = OTHER; note = 2'-fluorocytidine
  modified_base 15: mod_base = um
  modified_base 16: mod_base = OTHER; note = 2'-fluorouridine
  modified_base 17: mod_base = gm
  modified_base 18: mod_base = OTHER; note = 2'-fluoroadenosine
  modified_base 19: mod_base = gm
  modified_base 20: mod_base = OTHER; note = 2'-fluoroadenosine
  modified_base 20^21: mod_base = OTHER; note = phosphorothioate linkage
  modified_base 21: mod_base = cm
  source 1..21: mol_type = other RNA
agagataaaatctcttgagac

SEQ ID NO: 361 - RNA, 21 nt, synthetic construct
  modified_base 1: mod_base = um
  modified_base 1^2: mod_base = OTHER; note = phosphorothioate linkage
  modified_base 2: mod_base = OTHER; note = 2'-fluorocytidine
  modified_base 2^3: mod_base = OTHER; note = phosphorothioate linkage
  modified_base 3: mod_base = OTHER; note = 2'-O-methyladenosine
  modified_base 3^4: mod_base = OTHER; note = phosphorothioate linkage
  modified_base 4: mod_base = OTHER; note = 2'-fluorouridine
  modified_base 5: mod_base = OTHER; note = 2'-O-methyladenosine
  modified_base 6: mod_base = OTHER; note = 2'-fluoroguanosine
  modified_base 7: mod_base = OTHER; note = 2'-O-methyladenosine
  modified_base 8: mod_base = OTHER; note = 2'-fluoroguanosine
  modified_base 9: mod_base = OTHER; note = 2'-O-methyladenosine
  modified_base 10: mod_base = OTHER; note = 2'-fluorouridine
  modified_base 11: mod_base = OTHER; note = 2'-O-methyladenosine
  modified_base 12: mod_base = OTHER; note = 2'-fluoroadenosine
  modified_base 13: mod_base = OTHER; note = 2'-O-methyladenosine
  modified_base 14: mod_base = OTHER; note = 2'-fluoroadenosine
  modified_base 15: mod_base = um
  modified_base 16: mod_base = OTHER; note = 2'-fluorocytidine
  modified_base 17: mod_base = um
  modified_base 18: mod_base = OTHER; note = 2'-fluorocytidine
  modified_base 19: mod_base = um
  modified_base 20: mod_base = OTHER; note = 2'-fluorouridine
  modified_base 20^21: mod_base = OTHER; note = phosphorothioate linkage
  modified_base 21: mod_base = gm
  source 1..21: mol_type = other RNA
tcatagagataaaatctcttg

SEQ ID NO: 362 - RNA, 21 nt, synthetic construct
  modified_base 1: mod_base = um
  modified_base 1^2: mod_base = OTHER; note = phosphorothioate linkage
  modified_base 2: mod_base = OTHER; note = 2'-fluoroadenosine
  modified_base 2^3: mod_base = OTHER; note = phosphorothioate linkage
  modified_base 3: mod_base = gm
  modified_base 3^4: mod_base = OTHER; note = phosphorothioate linkage
  modified_base 4: mod_base = OTHER; note = 2'-fluorouridine
  modified_base 5: mod_base = cm
  modified_base 6: mod_base = OTHER; note = 2'-fluoroadenosine
  modified_base 7: mod_base = um
  modified_base 8: mod_base = OTHER; note = 2'-fluoroadenosine
  modified_base 9: mod_base = gm
  modified_base 10: mod_base = OTHER; note = 2'-fluoroadenosine
  modified_base 11: mod_base = gm
  modified_base 12: mod_base = OTHER; note = 2'-fluoroadenosine
  modified_base 13: mod_base = um
  modified_base 14: mod_base = OTHER; note = 2'-fluoroadenosine
  modified_base 15: mod_base = OTHER; note = 2'-O-methyladenosine
  modified_base 16: mod_base = OTHER; note = 2'-fluoroadenosine
  modified_base 17: mod_base = OTHER; note = 2'-O-methyladenosine
  modified_base 18: mod_base = OTHER; note = 2'-fluorouridine
  modified_base 19: mod_base = cm
  modified_base 20: mod_base = OTHER; note = 2'-fluorouridine
  modified_base 20^21: mod_base = OTHER; note = phosphorothioate linkage
  modified_base 21: mod_base = cm
  source 1..21: mol_type = other RNA
tagtcatagagataaaatctc

SEQ ID NO: 363 - RNA, 21 nt, synthetic construct
  modified_base 1: mod_base = um
  modified_base 1^2: mod_base = OTHER; note = phosphorothioate linkage
  modified_base 2: mod_base = OTHER; note = 2'-fluoroadenosine
  modified_base 2^3: mod_base = OTHER; note = phosphorothioate linkage
  modified_base 3: mod_base = OTHER; note = 2'-O-methyladenosine
  modified_base 3^4: mod_base = OTHER; note = phosphorothioate linkage
  modified_base 4: mod_base = OTHER; note = 2'-fluorocytidine
  modified_base 5: mod_base = OTHER; note = 2'-O-methyladenosine
  modified_base 6: mod_base = OTHER; note = 2'-fluorouridine
  modified_base 7: mod_base = cm
  modified_base 8: mod_base = OTHER; note = 2'-fluorouridine
  modified_base 9: mod_base = gm
  modified_base 10: mod_base = OTHER; note = 2'-fluoroguanosine
  modified_base 11: mod_base = cm
  modified_base 12: mod_base = OTHER; note = 2'-fluoroadenosine
  modified_base 13: mod_base = cm
  modified_base 14: mod_base = OTHER; note = 2'-fluorouridine
  modified_base 15: mod_base = cm
  modified_base 16: mod_base = OTHER; note = 2'-fluorocytidine
  modified_base 17: mod_base = OTHER; note = 2'-O-methyladenosine
  modified_base 18: mod_base = OTHER; note = 2'-fluorocytidine
  modified_base 19: mod_base = OTHER; note = 2'-O-methyladenosine
  modified_base 20: mod_base = OTHER; note = 2'-fluorouridine
  modified_base 20^21: mod_base = OTHER; note = phosphorothioate linkage
  modified_base 21: mod_base = cm
  source 1..21: mol_type = other RNA
taacatctggcactccacatc

SEQ ID NO: 364 - RNA, 21 nt, synthetic construct
  modified_base 1: mod_base = um
  modified_base 1^2: mod_base = OTHER; note = phosphorothioate linkage
  modified_base 2: mod_base = OTHER; note = 2'-fluoroadenosine
  modified_base 2^3: mod_base = OTHER; note = phosphorothioate linkage
  modified_base 3: mod_base = gm
  modified_base 3^4: mod_base = OTHER; note = phosphorothioate linkage
  modified_base 4: mod_base = OTHER; note = 2'-fluorouridine
  modified_base 5: mod_base = OTHER; note = 2'-O-methyladenosine
  modified_base 6: mod_base = OTHER; note = 2'-fluorouridine
  modified_base 7: mod_base = um
  modified_base 8: mod_base = OTHER; note = 2'-fluorocytidine
  modified_base 9: mod_base = um
  modified_base 10: mod_base = OTHER; note = 2'-fluoroguanosine
  modified_base 11: mod_base = cm
  modified_base 12: mod_base = OTHER; note = 2'-fluoroadenosine
  modified_base 13: mod_base = OTHER; note = 2'-O-methyladenosine
  modified_base 14: mod_base = OTHER; note = 2'-fluorocytidine
  modified_base 15: mod_base = OTHER; note = 2'-O-methyladenosine
  modified_base 16: mod_base = OTHER; note = 2'-fluorouridine
  modified_base 17: mod_base = cm
  modified_base 18: mod_base = OTHER; note = 2'-fluorouridine
  modified_base 19: mod_base = gm
  modified_base 20: mod_base = OTHER; note = 2'-fluoroguanosine
  modified_base 20^21: mod_base = OTHER; note = phosphorothioate linkage
  modified_base 21: mod_base = cm
  source 1..21: mol_type = other RNA
tagtattctgcaacatctggc

SEQ ID NO: 365 - RNA, 21 nt, synthetic construct
  modified_base 1: mod_base = OTHER; note = 2'-O-methyladenosine
  modified_base 1^2: mod_base = OTHER; note = phosphorothioate linkage
  modified_base 2: mod_base = OTHER; note = 2'-fluoroadenosine
  modified_base 2^3: mod_base = OTHER; note = phosphorothioate linkage
  modified_base 3: mod_base = um
  modified_base 3^4: mod_base = OTHER; note = phosphorothioate linkage
  modified_base 4: mod_base = OTHER; note = 2'-fluoroadenosine
  modified_base 5: mod_base = gm
  modified_base 6: mod_base = OTHER; note = 2'-fluorouridine
  modified_base 7: mod_base = gm
  modified_base 8: mod_base = OTHER; note = 2'-fluoroadenosine
  modified_base 9: mod_base = gm
  modified_base 10: mod_base = OTHER; note = 2'-fluorouridine
  modified_base 11: mod_base = OTHER; note = 2'-O-methyladenosine
  modified_base 12: mod_base = OTHER; note = 2'-fluorouridine
  modified_base 13: mod_base = um
  modified_base 14: mod_base = OTHER; note = 2'-fluorocytidine
  modified_base 15: mod_base = um
  modified_base 16: mod_base = OTHER; note = 2'-fluoroguanosine
  modified_base 17: mod_base = cm
  modified_base 18: mod_base = OTHER; note = 2'-fluoroadenosine
  modified_base 19: mod_base = OTHER; note = 2'-O-methyladenosine
  modified_base 20: mod_base = OTHER; note = 2'-fluorocytidine
  modified_base 20^21: mod_base = OTHER; note = phosphorothioate linkage
  modified_base 21: mod_base = cm
  source 1..21: mol_type = other RNA
aatagtgagtattctgcaacc

SEQ ID NO: 366 - RNA, 21 nt, synthetic construct
  modified_base 1: mod_base = OTHER; note = 2'-O-methyladenosine
  modified_base 1^2: mod_base = OTHER; note = phosphorothioate linkage
  modified_base 2: mod_base = OTHER; note = 2'-fluoroadenosine
  modified_base 2^3: mod_base = OTHER; note = phosphorothioate linkage
  modified_base 3: mod_base = OTHER; note = 2'-O-methyladenosine
  modified_base 3^4: mod_base = OTHER; note = phosphorothioate linkage
  modified_base 4: mod_base = OTHER; note = 2'-fluorouridine
  modified_base 5: mod_base = OTHER; note = 2'-O-methyladenosine
  modified_base 6: mod_base = OTHER; note = 2'-fluoroguanosine
  modified_base 7: mod_base = um
  modified_base 8: mod_base = OTHER; note = 2'-fluoroguanosine
  modified_base 9: mod_base = OTHER; note = 2'-O-methyladenosine
  modified_base 10: mod_base = OTHER; note = 2'-fluoroguanosine
  modified_base 11: mod_base = um
  modified_base 12: mod_base = OTHER; note = 2'-fluoroadenosine
  modified_base 13: mod_base = um
  modified_base 14: mod_base = OTHER; note = 2'-fluorouridine
  modified_base 15: mod_base = cm
  modified_base 16: mod_base = OTHER; note = 2'-fluorouridine
  modified_base 17: mod_base = gm
  modified_base 18: mod_base = OTHER; note = 2'-fluorocytidine
  modified_base 19: mod_base = OTHER; note = 2'-O-methyladenosine
  modified_base 20: mod_base = OTHER; note = 2'-fluoroadenosine
  modified_base 20^21: mod_base = OTHER; note = phosphorothioate linkage
  modified_base 21: mod_base = cm
  source 1..21: mol_type = other RNA
aaatagtgagtattctgcaac

SEQ ID NO: 367 - RNA, 21 nt, synthetic construct
  modified_base 1: mod_base = um
  modified_base 1^2: mod_base = OTHER; note = phosphorothioate linkage
  modified_base 2: mod_base = OTHER; note = 2'-fluoroadenosine
  modified_base 2^3: mod_base = OTHER; note = phosphorothioate linkage
  modified_base 3: mod_base = cm
  modified_base 3^4: mod_base = OTHER; note = phosphorothioate linkage
  modified_base 4: mod_base = OTHER; note = 2'-fluorouridine
  modified_base 5: mod_base = OTHER; note = 2'-O-methyladenosine
  modified_base 6: mod_base = OTHER; note = 2'-fluoroadenosine
  modified_base 7: mod_base = um
  modified_base 8: mod_base = OTHER; note = 2'-fluorocytidine
  modified_base 9: mod_base = gm
  modified_base 10: mod_base = OTHER; note = 2'-fluoroadenosine
  modified_base 11: mod_base = um
  modified_base 12: mod_base = OTHER; note = 2'-fluorocytidine
  modified_base 13: mod_base = cm
  modified_base 14: mod_base = OTHER; note = 2'-fluoroadenosine
  modified_base 15: mod_base = cm
  modified_base 16: mod_base = OTHER; note = 2'-fluorouridine
  modified_base 17: mod_base = gm
  modified_base 18: mod_base = OTHER; note = 2'-fluorouridine
  modified_base 19: mod_base = OTHER; note = 2'-O-methyladenosine
  modified_base 20: mod_base = OTHER; note = 2'-fluoroadenosine
  modified_base 20^21: mod_base = OTHER; note = phosphorothioate linkage
  modified_base 21: mod_base = cm
  source 1..21: mol_type = other RNA
tactaatcgatccactgtaac

SEQ ID NO: 368 - RNA, 21 nt, synthetic construct
  modified_base 1: mod_base = OTHER; note = 2'-O-methyladenosine
  modified_base 1^2: mod_base = OTHER; note = phosphorothioate linkage
  modified_base 2: mod_base = OTHER; note = 2'-fluorocytidine
  modified_base 2^3: mod_base = OTHER; note = phosphorothioate linkage
  modified_base 3: mod_base = OTHER; note = 2'-O-methyladenosine
  modified_base 3^4: mod_base = OTHER; note = phosphorothioate linkage
  modified_base 4: mod_base = OTHER; note = 2'-fluorocytidine
  modified_base 5: mod_base = um
  modified_base 6: mod_base = OTHER; note = 2'-fluoroadenosine
  modified_base 7: mod_base = OTHER; note = 2'-O-methyladenosine
  modified_base 8: mod_base = OTHER; note = 2'-fluorouridine
  modified_base 9: mod_base = cm
  modified_base 10: mod_base = OTHER; note = 2'-fluoroguanosine
  modified_base 11: mod_base = OTHER; note = 2'-O-methyladenosine
  modified_base 12: mod_base = OTHER; note = 2'-fluorouridine
  modified_base 13: mod_base = cm
  modified_base 14: mod_base = OTHER; note = 2'-fluorocytidine
  modified_base 15: mod_base = OTHER; note = 2'-O-methyladenosine
  modified_base 16: mod_base = OTHER; note = 2'-fluorocytidine
  modified_base 17: mod_base = um
  modified_base 18: mod_base = OTHER; note = 2'-fluoroguanosine
  modified_base 19: mod_base = um
  modified_base 20: mod_base = OTHER; note = 2'-fluoroadenosine
  modified_base 20^21: mod_base = OTHER; note = phosphorothioate linkage
  modified_base 21: mod_base = cm
  source 1..21: mol_type = other RNA
acactaatcgatccactgtac

SEQ ID NO: 369 - RNA, 21 nt, synthetic construct
  modified_base 1: mod_base = um
  modified_base 1^2: mod_base = OTHER; note = phosphorothioate linkage
  modified_base 2: mod_base = OTHER; note = 2'-fluorouridine
  modified_base 2^3: mod_base = OTHER; note = phosphorothioate linkage
  modified_base 3: mod_base = gm
  modified_base 3^4: mod_base = OTHER; note = phosphorothioate linkage
  modified_base 4: mod_base = OTHER; note = 2'-fluoroadenosine
  modified_base 5: mod_base = cm
  modified_base 6: mod_base = OTHER; note = 2'-fluoroadenosine
  modified_base 7: mod_base = cm
  modified_base 8: mod_base = OTHER; note = 2'-fluorouridine
  modified_base 9: mod_base = OTHER; note = 2'-O-methyladenosine
  modified_base 10: mod_base = OTHER; note = 2'-fluoroadenosine
  modified_base 11: mod_base = um
  modified_base 12: mod_base = OTHER; note = 2'-fluorocytidine
  modified_base 13: mod_base = gm
  modified_base 14: mod_base = OTHER; note = 2'-fluoroadenosine
  modified_base 15: mod_base = um
  modified_base 16: mod_base = OTHER; note = 2'-fluorocytidine
  modified_base 17: mod_base = cm
  modified_base 18: mod_base = OTHER; note = 2'-fluoroadenosine
  modified_base 19: mod_base = cm
  modified_base 20: mod_base = OTHER; note = 2'-fluorouridine
  modified_base 20^21: mod_base = OTHER; note = phosphorothioate linkage
  modified_base 21: mod_base = gm
  source 1..21: mol_type = other RNA
ttgacactaatcgatccactg

SEQ ID NO: 370 - RNA, 21 nt, synthetic construct
  modified_base 1: mod_base = um
  modified_base 1^2: mod_base = OTHER; note = phosphorothioate linkage
  modified_base 2: mod_base = OTHER; note = 2'-fluorocytidine
  modified_base 2^3: mod_base = OTHER; note = phosphorothioate linkage
  modified_base 3: mod_base = OTHER; note = 2'-O-methyladenosine
  modified_base 3^4: mod_base = OTHER; note = phosphorothioate linkage
  modified_base 4: mod_base = OTHER; note = 2'-fluorouridine
  modified_base 5: mod_base = cm
  modified_base 6: mod_base = OTHER; note = 2'-fluoroguanosine
  modified_base 7: mod_base = OTHER; note = 2'-O-methyladenosine
  modified_base 8: mod_base = OTHER; note = 2'-fluoroadenosine
  modified_base 9: mod_base = gm
  modified_base 10: mod_base = OTHER; note = 2'-fluorouridine
  modified_base 11: mod_base = gm
  modified_base 12: mod_base = OTHER; note = 2'-fluoroadenosine
  modified_base 13: mod_base = gm
  modified_base 14: mod_base = OTHER; note = 2'-fluorocytidine
  modified_base 15: mod_base = OTHER; note = 2'-O-methyladenosine
  modified_base 16: mod_base = OTHER; note = 2'-fluorouridine
  modified_base 17: mod_base = cm
  modified_base 18: mod_base = OTHER; note = 2'-fluorouridine
  modified_base 19: mod_base = cm
  modified_base 20: mod_base = OTHER; note = 2'-fluorocytidine
  modified_base 20^21: mod_base = OTHER; note = phosphorothioate linkage
  modified_base 21: mod_base = um
  source 1..21: mol_type = other RNA
tcatcgaagtgagcatctcct

SEQ ID NO: 371 - RNA, 21 nt, synthetic construct
  modified_base 1: mod_base = um
  modified_base 1^2: mod_base = OTHER; note = phosphorothioate linkage
  modified_base 2: mod_base = OTHER; note = 2'-fluoroadenosine
  modified_base 2^3: mod_base = OTHER; note = phosphorothioate linkage
  modified_base 3: mod_base = gm
  modified_base 3^4: mod_base = OTHER; note = phosphorothioate linkage
  modified_base 4: mod_base = OTHER; note = 2'-fluorocytidine
  modified_base 5: mod_base = OTHER; note = 2'-O-methyladenosine
  modified_base 6: mod_base = OTHER; note = 2'-fluorouridine
  modified_base 7: mod_base = OTHER; note = 2'-O-methyladenosine
  modified_base 8: mod_base = OTHER; note = 2'-fluorocytidine
  modified_base 9: mod_base = OTHER; note = 2'-O-methyladenosine
  modified_base 10: mod_base = OTHER; note = 2'-fluoroguanosine
  modified_base 11: mod_base = gm
  modified_base 12: mod_base = OTHER; note = 2'-fluoroadenosine
  modified_base 13: mod_base = OTHER; note = 2'-O-methyladenosine
  modified_base 14: mod_base = OTHER; note = 2'-fluoroguanosine
  modified_base 15: mod_base = um
  modified_base 16: mod_base = OTHER; note = 2'-fluorouridine
  modified_base 17: mod_base = OTHER; note = 2'-O-methyladenosine
  modified_base 18: mod_base = OTHER; note = 2'-fluoroadenosine
  modified_base 19: mod_base = um
  modified_base 20: mod_base = OTHER; note = 2'-fluorocytidine
  modified_base 20^21: mod_base = OTHER; note = phosphorothioate linkage
  modified_base 21: mod_base = cm
  source 1..21: mol_type = other RNA
tagcatacaggaagttaatcc

SEQ ID NO: 372 - RNA, 21 nt, synthetic construct
  modified_base 1: mod_base = OTHER; note = 2'-O-methyladenosine
  modified_base 1^2: mod_base = OTHER; note = phosphorothioate linkage
  modified_base 2: mod_base = OTHER; note = 2'-fluorouridine
  modified_base 2^3: mod_base = OTHER; note = phosphorothioate linkage
  modified_base 3: mod_base = OTHER; note = 2'-O-methyladenosine
  modified_base 3^4: mod_base = OTHER; note = phosphorothioate linkage
  modified_base 4: mod_base = OTHER; note = 2'-fluoroguanosine
  modified_base 5: mod_base = gm
  modified_base 6: mod_base = OTHER; note = 2'-fluorouridine
  modified_base 7: mod_base = um
  modified_base 8: mod_base = OTHER; note = 2'-fluoroguanosine
  modified_base 9: mod_base = gm
  modified_base 10: mod_base = OTHER; note = 2'-fluoroadenosine
  modified_base 11: mod_base = um
  modified_base 12: mod_base = OTHER; note = 2'-fluoroadenosine
  modified_base 13: mod_base = cm
  modified_base 14: mod_base = OTHER; note = 2'-fluoroadenosine
  modified_base 15: mod_base = um
  modified_base 16: mod_base = OTHER; note = 2'-fluorocytidine
  modified_base 17: mod_base = OTHER; note = 2'-O-methyladenosine
  modified_base 18: mod_base = OTHER; note = 2'-fluorocytidine
  modified_base 19: mod_base = um
  modified_base 20: mod_base = OTHER; note = 2'-fluoroguanosine
  modified_base 20^21: mod_base = OTHER; note = phosphorothioate linkage
  modified_base 21: mod_base = cm
  source 1..21: mol_type = other RNA
ataggttggatacatcactgc

SEQ ID NO: 373 - RNA, 21 nt, synthetic construct
  modified_base 1: mod_base = OTHER; note = 2'-O-methyladenosine
  modified_base 1^2: mod_base = OTHER; note = phosphorothioate linkage
  modified_base 2: mod_base = OTHER; note = 2'-fluorouridine
  modified_base 2^3: mod_base = OTHER; note = phosphorothioate linkage
  modified_base 3: mod_base = um
  modified_base 3^4: mod_base = OTHER; note = phosphorothioate linkage
  modified_base 4: mod_base = OTHER; note = 2'-fluorouridine
  modified_base 5: mod_base = cm
  modified_base 6: mod_base = OTHER; note = 2'-fluorocytidine
  modified_base 7: mod_base = OTHER; note = 2'-O-methyladenosine
  modified_base 8: mod_base = OTHER; note = 2'-fluorouridine
  modified_base 9: mod_base = OTHER; note = 2'-O-methyladenosine
  modified_base 10: mod_base = OTHER; note = 2'-fluoroguanosine
  modified_base 11: mod_base = gm
  modified_base 12: mod_base = OTHER; note = 2'-fluorouridine
  modified_base 13: mod_base = um
  modified_base 14: mod_base = OTHER; note = 2'-fluoroguanosine
  modified_base 15: mod_base = gm
  modified_base 16: mod_base = OTHER; note = 2'-fluoroadenosine
  modified_base 17: mod_base = um
  modified_base 18: mod_base = OTHER; note = 2'-fluoroadenosine
  modified_base 19: mod_base = cm
  modified_base 20: mod_base = OTHER; note = 2'-fluoroadenosine
  modified_base 20^21: mod_base = OTHER; note = phosphorothioate linkage
  modified_base 21: mod_base = cm
  source 1..21: mol_type = other RNA
atttccataggttggatacac

SEQ ID NO: 374 - RNA, 21 nt, synthetic construct
  modified_base 1: mod_base = um
  modified_base 1^2: mod_base = OTHER; note = phosphorothioate linkage
  modified_base 2: mod_base = OTHER; note = 2'-fluorocytidine
  modified_base 2^3: mod_base = OTHER; note = phosphorothioate linkage
  modified_base 3: mod_base = cm
  modified_base 3^4: mod_base = OTHER; note = phosphorothioate linkage
  modified_base 4: mod_base = OTHER; note = 2'-fluorouridine
  modified_base 5: mod_base = um
  modified_base 6: mod_base = OTHER; note = 2'-fluorouridine
  modified_base 7: mod_base = OTHER; note = 2'-O-methyladenosine
  modified_base 8: mod_base = OTHER; note = 2'-fluoroadenosine
  modified_base 9: mod_base = um
  modified_base 10: mod_base = OTHER; note = 2'-fluoroadenosine
  modified_base 11: mod_base = um
  modified_base 12: mod_base = OTHER; note = 2'-fluorocytidine
  modified_base 13: mod_base = OTHER; note = 2'-O-methyladenosine
  modified_base 14: mod_base = OTHER; note = 2'-fluorouridine
  modified_base 15: mod_base = cm
  modified_base 16: mod_base = OTHER; note = 2'-fluorocytidine
  modified_base 17: mod_base = um
  modified_base 18: mod_base = OTHER; note = 2'-fluoroguanosine
  modified_base 19: mod_base = gm
  modified_base 20: mod_base = OTHER; note = 2'-fluoroguanosine
  modified_base 20^21: mod_base = OTHER; note = phosphorothioate linkage
  modified_base 21: mod_base = OTHER; note = 2'-O-methyladenosine
  source 1..21: mol_type = other RNA
tcctttaatatcatcctggga

SEQ ID NO: 375 - RNA, 21 nt, synthetic construct
  modified_base 1: mod_base = um
  modified_base 1^2: mod_base = OTHER; note = phosphorothioate linkage
  modified_base 2: mod_base = OTHER; note = 2'-fluoroadenosine
  modified_base 2^3: mod_base = OTHER; note = phosphorothioate linkage
  modified_base 3: mod_base = um
  modified_base 3^4: mod_base = OTHER; note = phosphorothioate linkage
  modified_base 4: mod_base = OTHER; note = 2'-fluoroadenosine
  modified_base 5: mod_base = gm
  modified_base 6: mod_base = OTHER; note = 2'-fluorouridine
  modified_base 7: mod_base = um
  modified_base 8: mod_base = OTHER; note = 2'-fluorouridine
  modified_base 9: mod_base = cm
  modified_base 10: mod_base = OTHER; note = 2'-fluorouridine
  modified_base 11: mod_base = gm
  modified_base 12: mod_base = OTHER; note = 2'-fluoroadenosine
  modified_base 13: mod_base = OTHER; note = 2'-O-methyladenosine
  modified_base 14: mod_base = OTHER; note = 2'-fluorouridine
  modified_base 15: mod_base = gm
  modified_base 16: mod_base = OTHER; note = 2'-fluorocytidine
  modified_base 17: mod_base = cm
  modified_base 18: mod_base = OTHER; note = 2'-fluorouridine
  modified_base 19: mod_base = um
  modified_base 20: mod_base = OTHER; note = 2'-fluorouridine
  modified_base 20^21: mod_base = OTHER; note = phosphorothioate linkage
  modified_base 21: mod_base = cm
  source 1..21: mol_type = other RNA
tatagtttctgaatgcctttc

SEQ ID NO: 376 - RNA, 21 nt, synthetic construct
  modified_base 1: mod_base = um
  modified_base 1^2: mod_base = OTHER; note = phosphorothioate linkage
  modified_base 2: mod_base = OTHER; note = 2'-fluorocytidine
  modified_base 2^3: mod_base = OTHER; note = phosphorothioate linkage
  modified_base 3: mod_base = OTHER; note = 2'-O-methyladenosine
  modified_base 3^4: mod_base = OTHER; note = phosphorothioate linkage
  modified_base 4: mod_base = OTHER; note = 2'-fluoroadenosine
  modified_base 5: mod_base = um
  modified_base 6: mod_base = OTHER; note = 2'-fluorouridine
  modified_base 7: mod_base = cm
  modified_base 8: mod_base = OTHER; note = 2'-fluorouridine
  modified_base 9: mod_base = gm
  modified_base 10: mod_base = OTHER; note = 2'-fluoroadenosine
  modified_base 11: mod_base = um
  modified_base 12: mod_base = OTHER; note = 2'-fluorouridine
  modified_base 13: mod_base = gm
  modified_base 14: mod_base = OTHER; note = 2'-fluorouridine
  modified_base 15: mod_base = gm
  modified_base 16: mod_base = OTHER; note = 2'-fluorocytidine
  modified_base 17: mod_base = OTHER; note = 2'-O-methyladenosine
  modified_base 18: mod_base = OTHER; note = 2'-fluoroadenosine
  modified_base 19: mod_base = cm
  modified_base 20: mod_base = OTHER; note = 2'-fluoroadenosine
  modified_base 20^21: mod_base = OTHER; note = phosphorothioate linkage
  modified_base 21: mod_base = cm
  source 1..21: mol_type = other RNA
tcaattctgattgtgcaacac

SEQ ID NO: 377 - RNA, 21 nt, synthetic construct
  modified_base 1: mod_base = OTHER; note = 2'-O-methyladenosine
  modified_base 1^2: mod_base = OTHER; note = phosphorothioate linkage
  modified_base 2: mod_base = OTHER; note = 2'-fluorouridine
  modified_base 2^3: mod_base = OTHER; note = phosphorothioate linkage
  modified_base 3: mod_base = cm
  modified_base 3^4: mod_base = OTHER; note = phosphorothioate linkage
  modified_base 4: mod_base = OTHER; note = 2'-fluoroadenosine
  modified_base 5: mod_base = OTHER; note = 2'-O-methyladenosine
  modified_base 6: mod_base = OTHER; note = 2'-fluorouridine
  modified_base 7: mod_base = um
  modified_base 8: mod_base = OTHER; note = 2'-fluorocytidine
  modified_base 9: mod_base = um
  modified_base 10: mod_base = OTHER; note = 2'-fluoroguanosine
  modified_base 11: mod_base = OTHER; note = 2'-O-methyladenosine
  modified_base 12: mod_base = OTHER; note = 2'-fluorouridine
  modified_base 13: mod_base = um
  modified_base 14: mod_base = OTHER; note = 2'-fluoroguanosine
  modified_base 15: mod_base = um
  modified_base 16: mod_base = OTHER; note = 2'-fluoroguanosine
  modified_base 17: mod_base = cm
  modified_base 18: mod_base = OTHER; note = 2'-fluoroadenosine
  modified_base 19: mod_base = OTHER; note = 2'-O-methyladenosine
  modified_base 20: mod_base = OTHER; note = 2'-fluorocytidine
  modified_base 20^21: mod_base = OTHER; note = phosphorothioate linkage
  modified_base 21: mod_base = cm
  source 1..21: mol_type = other RNA
atcaattctgattgtgcaacc

SEQ ID NO: 378 - RNA, 21 nt, synthetic construct
  modified_base 1: mod_base = um
  modified_base 1^2: mod_base = OTHER; note = phosphorothioate linkage
  modified_base 2: mod_base = OTHER; note = 2'-fluoroguanosine
  modified_base 2^3: mod_base = OTHER; note = phosphorothioate linkage
  modified_base 3: mod_base = cm
  modified_base 3^4: mod_base = OTHER; note = phosphorothioate linkage
  modified_base 4: mod_base = OTHER; note = 2'-fluorouridine
  modified_base 5: mod_base = um
  modified_base 6: mod_base = OTHER; note = 2'-fluoroadenosine
  modified_base 7: mod_base = um
  modified_base 8: mod_base = OTHER; note = 2'-fluorocytidine
  modified_base 9: mod_base = OTHER; note = 2'-O-methyladenosine
  modified_base 10: mod_base = OTHER; note = 2'-fluoroadenosine
  modified_base 11: mod_base = um
  modified_base 12: mod_base = OTHER; note = 2'-fluorouridine
  modified_base 13: mod_base = cm
  modified_base 14: mod_base = OTHER; note = 2'-fluorouridine
  modified_base 15: mod_base = gm
  modified_base 16: mod_base = OTHER; note = 2'-fluoroadenosine
  modified_base 17: mod_base = um
  modified_base 18: mod_base = OTHER; note = 2'-fluorouridine
  modified_base 19: mod_base = gm
  modified_base 20: mod_base = OTHER; note = 2'-fluorouridine
  modified_base 20^21: mod_base = OTHER; note = phosphorothioate linkage
  modified_base 21: mod_base = gm
  source 1..21: mol_type = other RNA
tgcttatcaattctgattgtg

SEQ ID NO: 379 - RNA, 21 nt, synthetic construct
  modified_base 1: mod_base = um
  modified_base 1^2: mod_base = OTHER; note = phosphorothioate linkage
  modified_base 2: mod_base = OTHER; note = 2'-fluorouridine
  modified_base 2^3: mod_base = OTHER; note = phosphorothioate linkage
  modified_base 3: mod_base = gm
  modified_base 3^4: mod_base = OTHER; note = phosphorothioate linkage
  modified_base 4: mod_base = OTHER; note = 2'-fluorocytidine
  modified_base 5: mod_base = um
  modified_base 6: mod_base = OTHER; note = 2'-fluorouridine
  modified_base 7: mod_base = OTHER; note = 2'-O-methyladenosine
  modified_base 8: mod_base = OTHER; note = 2'-fluorouridine
  modified_base 9: mod_base = cm
  modified_base 10: mod_base = OTHER; note = 2'-fluoroadenosine
  modified_base 11: mod_base = OTHER; note = 2'-O-methyladenosine
  modified_base 12: mod_base = OTHER; note = 2'-fluorouridine
  modified_base 13: mod_base = um
  modified_base 14: mod_base = OTHER; note = 2'-fluorocytidine
  modified_base 15: mod_base = um
  modified_base 16: mod_base = OTHER; note = 2'-fluoroguanosine
  modified_base 17: mod_base = OTHER; note = 2'-O-methyladenosine
  modified_base 18: mod_base = OTHER; note = 2'-fluorouridine
  modified_base 19: mod_base = um
  modified_base 20: mod_base = OTHER; note = 2'-fluoroguanosine
  modified_base 20^21: mod_base = OTHER; note = phosphorothioate linkage
  modified_base 21: mod_base = cm
  source 1..21: mol_type = other RNA
ttgcttatcaattctgattgc

SEQ ID NO: 380 - RNA, 21 nt, synthetic construct
  modified_base 1: mod_base = um
  modified_base 1^2: mod_base = OTHER; note = phosphorothioate linkage
  modified_base 2: mod_base = OTHER; note = 2'-fluoroguanosine
  modified_base 2^3: mod_base = OTHER; note = phosphorothioate linkage
  modified_base 3: mod_base = cm
  modified_base 3^4: mod_base = OTHER; note = phosphorothioate linkage
  modified_base 4: mod_base = OTHER; note = 2'-fluoroadenosine
  modified_base 5: mod_base = OTHER; note = 2'-O-methyladenosine
  modified_base 6: mod_base = OTHER; note = 2'-fluorouridine
  modified_base 7: mod_base = OTHER; note = 2'-O-methyladenosine
  modified_base 8: mod_base = OTHER; note = 2'-fluoroadenosine
  modified_base 9: mod_base = OTHER; note = 2'-O-methyladenosine
  modified_base 10: mod_base = OTHER; note = 2'-fluoroadenosine
  modified_base 11: mod_base = OTHER; note = 2'-O-methyladenosine
  modified_base 12: mod_base = OTHER; note = 2'-fluoroadenosine
  modified_base 13: mod_base = gm
  modified_base 14: mod_base = OTHER; note = 2'-fluoroguanosine
  modified_base 15: mod_base = gm
  modified_base 16: mod_base = OTHER; note = 2'-fluorouridine
  modified_base 17: mod_base = gm
  modified_base 18: mod_base = OTHER; note = 2'-fluoroadenosine
  modified_base 19: mod_base = cm
  modified_base 20: mod_base = OTHER; note = 2'-fluoroadenosine
  modified_base 20^21: mod_base = OTHER; note = phosphorothioate linkage
  modified_base 21: mod_base = cm
  source 1..21: mol_type = other RNA
tgcaataaaaaagggtgacac

SEQ ID NO: 381 - RNA, 21 nt, synthetic construct
  modified_base 1: mod_base = OTHER; note = 2'-O-methyladenosine
  modified_base 1^2: mod_base = OTHER; note = phosphorothioate linkage
  modified_base 2: mod_base = OTHER; note = 2'-fluorocytidine
  modified_base 2^3: mod_base = OTHER; note = phosphorothioate linkage
  modified_base 3: mod_base = OTHER; note = 2'-O-methyladenosine
  modified_base 3^4: mod_base = OTHER; note = phosphorothioate linkage
  modified_base 4: mod_base = OTHER; note = 2'-fluorouridine
  modified_base 5: mod_base = um
  modified_base 6: mod_base = OTHER; note = 2'-fluorocytidine
  modified_base 7: mod_base = OTHER; note = 2'-O-methyladenosine
  modified_base 8: mod_base = OTHER; note = 2'-fluoroadenosine
  modified_base 9: mod_base = OTHER; note = 2'-O-methyladenosine
  modified_base 10: mod_base = OTHER; note = 2'-fluoroadenosine
  modified_base 11: mod_base = OTHER; note = 2'-O-methyladenosine
  modified_base 12: mod_base = OTHER; note = 2'-fluorocytidine
  modified_base 13: mod_base = cm
  modified_base 14: mod_base = OTHER; note = 2'-fluoroadenosine
  modified_base 15: mod_base = OTHER; note = 2'-O-methyladenosine
  modified_base 16: mod_base = OTHER; note = 2'-fluorocytidine
  modified_base 17: mod_base = um
  modified_base 18: mod_base = OTHER; note = 2'-fluoroguanosine
  modified_base 19: mod_base = cm
  modified_base 20: mod_base = OTHER; note = 2'-fluoroadenosine
  modified_base 20^21: mod_base = OTHER; note = phosphorothioate linkage
  modified_base 21: mod_base = cm
  source 1..21: mol_type = other RNA
acattcaaaaaccaactgcac

SEQ ID NO: 382 - RNA, 21 nt, synthetic construct
  modified_base 1: mod_base = OTHER; note = 2'-O-methyladenosine
  modified_base 1^2: mod_base = OTHER; note = phosphorothioate linkage
  modified_base 2: mod_base = OTHER; note = 2'-fluoroguanosine
  modified_base 2^3: mod_base = OTHER; note = phosphorothioate linkage
  modified_base 3: mod_base = OTHER; note = 2'-O-methyladenosine
  modified_base 3^4: mod_base = OTHER; note = phosphorothioate linkage
  modified_base 4: mod_base = OTHER; note = 2'-fluorocytidine
  modified_base 5: mod_base = OTHER; note = 2'-O-methyladenosine
  modified_base 6: mod_base = OTHER; note = 2'-fluorouridine
  modified_base 7: mod_base = um
  modified_base 8: mod_base = OTHER; note = 2'-fluorocytidine
  modified_base 9: mod_base = OTHER; note = 2'-O-methyladenosine
  modified_base 10: mod_base = OTHER; note = 2'-fluoroadenosine
  modified_base 11: mod_base = OTHER; note = 2'-O-methyladenosine
  modified_base 12: mod_base = OTHER; note = 2'-fluoroadenosine
  modified_base 13: mod_base = OTHER; note = 2'-O-methyladenosine
  modified_base 14: mod_base = OTHER; note = 2'-fluorocytidine
  modified_base 15: mod_base = cm
  modified_base 16: mod_base = OTHER; note = 2'-fluoroadenosine
  modified_base 17: mod_base = OTHER; note = 2'-O-methyladenosine
  modified_base 18: mod_base = OTHER; note = 2'-fluorocytidine
  modified_base 19: mod_base = um
  modified_base 20: mod_base = OTHER; note = 2'-fluoroguanosine
  modified_base 20^21: mod_base = OTHER; note = phosphorothioate linkage
  modified_base 21: mod_base = cm
  source 1..21: mol_type = other RNA
agacattcaaaaaccaactgc

SEQ ID NO: 383 - RNA, 21 nt, synthetic construct
  modified_base 1: mod_base = OTHER; note = 2'-O-methyladenosine
  modified_base 1^2: mod_base = OTHER; note = phosphorothioate linkage
  modified_base 2: mod_base = OTHER; note = 2'-fluoroadenosine
  modified_base 2^3: mod_base = OTHER; note = phosphorothioate linkage
  modified_base 3: mod_base = gm
  modified_base 3^4: mod_base = OTHER; note = phosphorothioate linkage
  modified_base 4: mod_base = OTHER; note = 2'-fluoroadenosine
  modified_base 5: mod_base = cm
  modified_base 6: mod_base = OTHER; note = 2'-fluoroadenosine
  modified_base 7: mod_base = um
  modified_base 8: mod_base = OTHER; note = 2'-fluorouridine
  modified_base 9: mod_base = cm
  modified_base 10: mod_base = OTHER; note = 2'-fluoroadenosine
  modified_base 11: mod_base = OTHER; note = 2'-O-methyladenosine
  modified_base 12: mod_base = OTHER; note = 2'-fluoroadenosine
  modified_base 13: mod_base = OTHER; note = 2'-O-methyladenosine
  modified_base 14: mod_base = OTHER; note = 2'-fluoroadenosine
  modified_base 15: mod_base = cm
  modified_base 16: mod_base = OTHER; note = 2'-fluorocytidine
  modified_base 17: mod_base = OTHER; note = 2'-O-methyladenosine
  modified_base 18: mod_base = OTHER; note = 2'-fluoroadenosine
  modified_base 19: mod_base = cm
  modified_base 20: mod_base = OTHER; note = 2'-fluorouridine
  modified_base 20^21: mod_base = OTHER; note = phosphorothioate linkage
  modified_base 21: mod_base = gm
  source 1..21: mol_type = other RNA
aagacattcaaaaaccaactg

SEQ ID NO: 384 - RNA, 21 nt, synthetic construct
  modified_base 1: mod_base = OTHER; note = 2'-O-methyladenosine
  modified_base 1^2: mod_base = OTHER; note = phosphorothioate linkage
  modified_base 2: mod_base = OTHER; note = 2'-fluoroguanosine
  modified_base 2^3: mod_base = OTHER; note = phosphorothioate linkage
  modified_base 3: mod_base = um
  modified_base 3^4: mod_base = OTHER; note = phosphorothioate linkage
  modified_base 4: mod_base = OTHER; note = 2'-fluorouridine
  modified_base 5: mod_base = um
  modified_base 6: mod_base = OTHER; note = 2'-fluoroadenosine
  modified_base 7: mod_base = um
  modified_base 8: mod_base = OTHER; note = 2'-fluorocytidine
  modified_base 9: mod_base = cm
  modified_base 10: mod_base = OTHER; note = 2'-fluorouridine
  modified_base 11: mod_base = um
  modified_base 12: mod_base = OTHER; note = 2'-fluoroadenosine
  modified_base 13: mod_base = OTHER; note = 2'-O-methyladenosine
  modified_base 14: mod_base = OTHER; note = 2'-fluoroadenosine
  modified_base 15: mod_base = OTHER; note = 2'-O-methyladenosine
  modified_base 16: mod_base = OTHER; note = 2'-fluoroguanosine
  modified_base 17: mod_base = gm
  modified_base 18: mod_base = OTHER; note = 2'-fluoroadenosine
  modified_base 19: mod_base = gm
  modified_base 20: mod_base = OTHER; note = 2'-fluorouridine
  modified_base 20^21: mod_base = OTHER; note = phosphorothioate linkage
  modified_base 21: mod_base = gm
  source 1..21: mol_type = other RNA
agtttatccttaaaaggagtg

SEQ ID NO: 385 - DNA, 21 bp, synthetic construct
  modified_base 1: mod_base = OTHER; note = 5-cyclopropyl phosphonate-2-O-methyluridine
  modified_base 1^2: mod_base = OTHER; note = phosphorothioate linkage
  modified_base 2: mod_base = OTHER; note = 2'-fluoroadenosine
  modified_base 2^3: mod_base = OTHER; note = phosphorothioate linkage
  modified_base 3: mod_base = OTHER; note = 2'-O-methyladenosine
  modified_base 3^4: mod_base = OTHER; note = phosphorothioate linkage
  modified_base 4: mod_base = OTHER; note = 2'-fluorocytidine
  modified_base 5: mod_base = OTHER; note = 2'-O-methyladenosine
  modified_base 6: mod_base = OTHER; note = 2'-fluorouridine
  modified_base 7: mod_base = cm
  modified_base 8: mod_base = OTHER; note = 2'-fluorouridine
  modified_base 9: mod_base = gm
  modified_base 10: mod_base = OTHER; note = 2'-fluoroguanosine
  modified_base 11: mod_base = cm
  modified_base 12: mod_base = OTHER; note = 2'-fluoroadenosine
  modified_base 13: mod_base = cm
  modified_base 14: mod_base = OTHER; note = 2'-fluorouridine
  modified_base 15: mod_base = cm
  modified_base 16: mod_base = OTHER; note = 2'-fluorocytidine
  modified_base 17: mod_base = OTHER; note = 2'-O-methyladenosine
  modified_base 18: mod_base = OTHER; note = 2'-fluorocytidine
  modified_base 19: mod_base = OTHER; note = 2'-O-methyladenosine
  modified_base 20: mod_base = OTHER; note = 2'-fluorouridine
  modified_base 20^21: mod_base = OTHER; note = phosphorothioate linkage
  modified_base 21: mod_base = cm
  source 1..21: mol_type = other DNA
taacatctggcactccacatc

SEQ ID NO: 386 - RNA, 21 nt, synthetic construct
  modified_base 1: mod_base = OTHER; note = 5-cyclopropyl phosphonate-2-O-methyluridine
  modified_base 2: mod_base = OTHER; note = 2'-fluoroadenosine
  modified_base 3: mod_base = OTHER; note = 2'-O-methyladenosine
  modified_base 4: mod_base = cm
  modified_base 5: mod_base = OTHER; note = 2'-O-methyladenosine
  modified_base 6: mod_base = um
  modified_base 7: mod_base = cm
  modified_base 8: mod_base = um
  modified_base 9: mod_base = gm
  modified_base 10: mod_base = gm
  modified_base 11: mod_base = cm
  modified_base 12: mod_base = OTHER; note = 2'-fluoroadenosine
  modified_base 13: mod_base = cm
  modified_base 14: mod_base = OTHER; note = 2'-fluorouridine
  modified_base 15: mod_base = cm
  modified_base 16: mod_base = OTHER; note = 2'-fluorocytidine
  modified_base 17: mod_base = OTHER; note = 2'-O-methyladenosine
  modified_base 18: mod_base = cm
  modified_base 19: mod_base = OTHER; note = 2'-O-methyladenosine
  modified_base 20: mod_base = um
  modified_base 20^21: mod_base = OTHER; note = phosphorothioate linkage
  modified_base 21: mod_base = cm
  source 1..21: mol_type = other RNA
taacatctggcactccacatc

SEQ ID NO: 387 - RNA, 21 nt, synthetic construct
  modified_base 1: mod_base = um
  modified_base 1^2: mod_base = OTHER; note = phosphorothioate linkage
  modified_base 2: mod_base = OTHER; note = 2'-fluorocytidine
  modified_base 2^3: mod_base = OTHER; note = phosphorothioate linkage
  modified_base 3: mod_base = OTHER; note = 2'-O-methyladenosine
  modified_base 3^4: mod_base = OTHER; note = phosphorothioate linkage
  modified_base 4: mod_base = OTHER; note = 2'-fluoroadenosine
  modified_base 5: mod_base = um
  modified_base 6: mod_base = OTHER; note = 2'-fluorouridine
  modified_base 7: mod_base = cm
  modified_base 8: mod_base = OTHER; note = 2'-fluorouridine
  modified_base 9: mod_base = gm
  modified_base 10: mod_base = OTHER; note = 2'-fluoroadenosine
  modified_base 11: mod_base = um
  modified_base 12: mod_base = OTHER; note = 2'-fluorouridine
  modified_base 13: mod_base = gm
  modified_base 14: mod_base = OTHER; note = 2'-fluorouridine
  modified_base 15: mod_base = gm
  modified_base 16: mod_base = OTHER; note = 2'-fluorocytidine
  modified_base 17: mod_base = OTHER; note = 2'-O-methyladenosine
  modified_base 18: mod_base = OTHER; note = 2'-fluoroadenosine
  modified_base 19: mod_base = cm
  modified_base 20: mod_base = OTHER; note = 2'-fluoroadenosine
  modified_base 20^21: mod_base = OTHER; note = phosphorothioate linkage
  modified_base 21: mod_base = gm
  source 1..21: mol_type = other RNA
tcaattctgattgtgcaacag

SEQ ID NO: 388 - RNA, 21 nt, synthetic construct
  modified_base 1: mod_base = OTHER; note = 5-cyclopropyl phosphonate-2-O-methyluridine
  modified_base 1^2: mod_base = OTHER; note = phosphorothioate linkage
  modified_base 2: mod_base = OTHER; note = 2'-fluorocytidine
  modified_base 2^3: mod_base = OTHER; note = phosphorothioate linkage
  modified_base 3: mod_base = OTHER; note = 2'-O-methyladenosine
  modified_base 3^4: mod_base = OTHER; note = phosphorothioate linkage
  modified_base 4: mod_base = OTHER; note = 2'-fluoroadenosine
  modified_base 5: mod_base = um
  modified_base 6: mod_base = OTHER; note = 2'-fluorouridine
  modified_base 7: mod_base = cm
  modified_base 8: mod_base = OTHER; note = 2'-fluorouridine
  modified_base 9: mod_base = gm
  modified_base 10: mod_base = OTHER; note = 2'-fluoroadenosine
  modified_base 11: mod_base = um
  modified_base 12: mod_base = OTHER; note = 2'-fluorouridine
  modified_base 13: mod_base = gm
  modified_base 14: mod_base = OTHER; note = 2'-fluorouridine
  modified_base 15: mod_base = gm
  modified_base 16: mod_base = OTHER; note = 2'-fluorocytidine
  modified_base 17: mod_base = OTHER; note = 2'-O-methyladenosine
  modified_base 18: mod_base = OTHER; note = 2'-fluoroadenosine
  modified_base 19: mod_base = cm
  modified_base 20: mod_base = OTHER; note = 2'-fluoroadenosine
  modified_base 20^21: mod_base = OTHER; note = phosphorothioate linkage
  modified_base 21: mod_base = cm
  source 1..21: mol_type = other RNA
tcaattctgattgtgcaacac

SEQ ID NO: 389 - RNA, 21 nt, synthetic construct
  modified_base 1: mod_base = um
  modified_base 1^2: mod_base = OTHER; note = phosphorothioate linkage
  modified_base 2: mod_base = OTHER; note = 2'-fluorocytidine
  modified_base 2^3: mod_base = OTHER; note = phosphorothioate linkage
  modified_base 3: mod_base = OTHER; note = 2'-O-methyladenosine
  modified_base 3^4: mod_base = OTHER; note = phosphorothioate linkage
  modified_base 4: mod_base = OTHER; note = 2'-O-methyladenosine
  modified_base 5: mod_base = um
  modified_base 6: mod_base = um
  modified_base 7: mod_base = cm
  modified_base 8: mod_base = um
  modified_base 9: mod_base = gm
  modified_base 10: mod_base = OTHER; note = 2'-O-methyladenosine
  modified_base 11: mod_base = um
  modified_base 12: mod_base = OTHER; note = 2'-fluorouridine
  modified_base 13: mod_base = gm
  modified_base 14: mod_base = OTHER; note = 2'-fluorouridine
  modified_base 15: mod_base = gm
  modified_base 16: mod_base = OTHER; note = 2'-fluorocytidine
  modified_base 17: mod_base = OTHER; note = 2'-O-methyladenosine
  modified_base 18: mod_base = OTHER; note = 2'-O-methyladenosine
  modified_base 19: mod_base = cm
  modified_base 20: mod_base = OTHER; note = 2'-O-methyladenosine
  modified_base 20^21: mod_base = OTHER; note = phosphorothioate linkage
  modified_base 21: mod_base = cm
  source 1..21: mol_type = other RNA
tcaattctgattgtgcaacac

SEQ ID NO: 390 - RNA, 21 nt, synthetic construct
  modified_base 1: mod_base = um
  modified_base 1^2: mod_base = OTHER; note = phosphorothioate linkage
  modified_base 2: mod_base = OTHER; note = 2'-fluorocytidine
  modified_base 2^3: mod_base = OTHER; note = phosphorothioate linkage
  modified_base 3: mod_base = OTHER; note = 2'-O-methyladenosine
  modified_base 3^4: mod_base = OTHER; note = phosphorothioate linkage
  modified_base 4: mod_base = OTHER; note = 2'-fluoroadenosine
  modified_base 5: mod_base = um
  modified_base 6: mod_base = um
  modified_base 7: mod_base = cm
  modified_base 8: mod_base = um
  modified_base 9: mod_base = gm
  modified_base 10: mod_base = OTHER; note = 2'-O-methyladenosine
  modified_base 11: mod_base = um
  modified_base 12: mod_base = OTHER; note = 2'-fluorouridine
  modified_base 13: mod_base = gm
  modified_base 14: mod_base = OTHER; note = 2'-fluorouridine
  modified_base 15: mod_base = gm
  modified_base 16: mod_base = OTHER; note = 2'-fluorocytidine
  modified_base 17: mod_base = OTHER; note = 2'-O-methyladenosine
  modified_base 18: mod_base = OTHER; note = 2'-O-methyladenosine
  modified_base 19: mod_base = cm
  modified_base 20: mod_base = OTHER; note = 2'-O-methyladenosine
  modified_base 20^21: mod_base = OTHER; note = phosphorothioate linkage
  modified_base 21: mod_base = cm
  source 1..21: mol_type = other RNA
tcaattctgattgtgcaacac

SEQ ID NO: 391 - RNA, 21 nt, synthetic construct
  modified_base 1: mod_base = um
  modified_base 1^2: mod_base = OTHER; note = phosphorothioate linkage
  modified_base 2: mod_base = OTHER; note = 2'-fluorocytidine
  modified_base 2^3: mod_base = OTHER; note = phosphorothioate linkage
  modified_base 3: mod_base = OTHER; note = 2'-O-methyladenosine
  modified_base 3^4: mod_base = OTHER; note = phosphorothioate linkage
  modified_base 4: mod_base = OTHER; note = 2'-fluoroadenosine
  modified_base 5: mod_base = um
  modified_base 6: mod_base = OTHER; note = 2'-fluorouridine
  modified_base 7: mod_base = cm
  modified_base 8: mod_base = um
  modified_base 9: mod_base = gm
  modified_base 10: mod_base = OTHER; note = 2'-O-methyladenosine
  modified_base 11: mod_base = um
  modified_base 12: mod_base = OTHER; note = 2'-fluorouridine
  modified_base 13: mod_base = gm
  modified_base 14: mod_base = OTHER; note = 2'-fluorouridine
  modified_base 15: mod_base = gm
  modified_base 16: mod_base = OTHER; note = 2'-fluorocytidine
  modified_base 17: mod_base = OTHER; note = 2'-O-methyladenosine
  modified_base 18: mod_base = OTHER; note = 2'-O-methyladenosine
  modified_base 19: mod_base = cm
  modified_base 20: mod_base = OTHER; note = 2'-O-methyladenosine
  modified_base 20^21: mod_base = OTHER; note = phosphorothioate linkage
  modified_base 21: mod_base = cm
  source 1..21: mol_type = other RNA
tcaattctgattgtgcaacac

SEQ ID NO: 392 - RNA, 21 nt, synthetic construct
  modified_base 1: mod_base = um
  modified_base 1^2: mod_base = OTHER; note = phosphorothioate linkage
  modified_base 2: mod_base = OTHER; note = 2'-fluorocytidine
  modified_base 2^3: mod_base = OTHER; note = phosphorothioate linkage
  modified_base 3: mod_base = OTHER; note = 2'-O-methyladenosine
  modified_base 3^4: mod_base = OTHER; note = phosphorothioate linkage
  modified_base 4: mod_base = OTHER; note = 2'-fluoroadenosine
  modified_base 5: mod_base = um
  modified_base 6: mod_base = OTHER; note = 2'-fluorouridine
  modified_base 7: mod_base = cm
  modified_base 8: mod_base = um
  modified_base 9: mod_base = gm
  modified_base 10: mod_base = OTHER; note = 2'-O-methyladenosine
  modified_base 11: mod_base = um
  modified_base 12: mod_base = OTHER; note = 2'-fluorouridine
  modified_base 13: mod_base = gm
  modified_base 14: mod_base = OTHER; note = 2'-fluorouridine
  modified_base 15: mod_base = gm
  modified_base 16: mod_base = OTHER; note = 2'-fluorocytidine
  modified_base 17: mod_base = OTHER; note = 2'-O-methyladenosine
  modified_base 18: mod_base = OTHER; note = 2'-fluoroadenosine
  modified_base 19: mod_base = cm
  modified_base 20: mod_base = OTHER; note = 2'-O-methyladenosine
  modified_base 20^21: mod_base = OTHER; note = phosphorothioate linkage
  modified_base 21: mod_base = cm
  source 1..21: mol_type = other RNA
tcaattctgattgtgcaacac

SEQ ID NO: 393 - RNA, 21 nt, synthetic construct
  modified_base 1: mod_base = um
  modified_base 1^2: mod_base = OTHER; note = phosphorothioate linkage
  modified_base 2: mod_base = OTHER; note = 2'-fluorouridine
  modified_base 2^3: mod_base = OTHER; note = phosphorothioate linkage
  modified_base 3: mod_base = gm
  modified_base 3^4: mod_base = OTHER; note = phosphorothioate linkage
  modified_base 4: mod_base = OTHER; note = 2'-O-methyladenosine
  modified_base 5: mod_base = cm
  modified_base 6: mod_base = OTHER; note = 2'-O-methyladenosine
  modified_base 7: mod_base = cm
  modified_base 8: mod_base = OTHER; note = 2'-fluorouridine
  modified_base 9: mod_base = OTHER; note = 2'-O-methyladenosine
  modified_base 10: mod_base = OTHER; note = 2'-fluoroadenosine
  modified_base 11: mod_base = um
  modified_base 12: mod_base = OTHER; note = 2'-fluorocytidine
  modified_base 13: mod_base = gm
  modified_base 14: mod_base = OTHER; note = 2'-fluoroadenosine
  modified_base 15: mod_base = um
  modified_base 16: mod_base = OTHER; note = 2'-fluorocytidine
  modified_base 17: mod_base = cm
  modified_base 18: mod_base = OTHER; note = 2'-O-methyladenosine
  modified_base 19: mod_base = cm
  modified_base 20: mod_base = um
  modified_base 20^21: mod_base = OTHER; note = phosphorothioate linkage
  modified_base 21: mod_base = gm
  source 1..21: mol_type = other RNA
ttgacactaatcgatccactg

SEQ ID NO: 394 - RNA, 21 nt, synthetic construct
  modified_base 1: mod_base = um
  modified_base 1^2: mod_base = OTHER; note = phosphorothioate linkage
  modified_base 2: mod_base = OTHER; note = 2'-fluorocytidine
  modified_base 2^3: mod_base = OTHER; note = phosphorothioate linkage
  modified_base 3: mod_base = cm
  modified_base 3^4: mod_base = OTHER; note = phosphorothioate linkage
  modified_base 4: mod_base = um
  modified_base 5: mod_base = um
  modified_base 6: mod_base = um
  modified_base 7: mod_base = OTHER; note = 2'-O-methyladenosine
  modified_base 8: mod_base = OTHER; note = 2'-fluoroadenosine
  modified_base 9: mod_base = um
  modified_base 10: mod_base = OTHER; note = 2'-fluoroadenosine
  modified_base 11: mod_base = um
  modified_base 12: mod_base = OTHER; note = 2'-fluorocytidine
  modified_base 13: mod_base = OTHER; note = 2'-O-methyladenosine
  modified_base 14: mod_base = OTHER; note = 2'-fluorouridine
  modified_base 15: mod_base = cm
  modified_base 16: mod_base = OTHER; note = 2'-fluorocytidine
  modified_base 17: mod_base = um
  modified_base 18: mod_base = gm
  modified_base 19: mod_base = gm
  modified_base 20: mod_base = gm
  modified_base 20^21: mod_base = OTHER; note = phosphorothioate linkage
  modified_base 21: mod_base = OTHER; note = 2'-O-methyladenosine
  source 1..21: mol_type = other RNA
tcctttaatatcatcctggga

SEQ ID NO: 395 - RNA, 21 nt, synthetic construct
  modified_base 1: mod_base = OTHER; note = 2'-O-methyladenosine
  modified_base 1^2: mod_base = OTHER; note = phosphorothioate linkage
  modified_base 2: mod_base = OTHER; note = 2'-fluoroguanosine
  modified_base 2^3: mod_base = OTHER; note = phosphorothioate linkage
  modified_base 3: mod_base = OTHER; note = 2'-O-methyladenosine
  modified_base 3^4: mod_base = OTHER; note = phosphorothioate linkage
  modified_base 4: mod_base = cm
  modified_base 5: mod_base = OTHER; note = 2'-O-methyladenosine
  modified_base 6: mod_base = um
  modified_base 7: mod_base = um
  modified_base 8: mod_base = cm
  modified_base 9: mod_base = OTHER; note = 2'-O-methyladenosine
  modified_base 10: mod_base = OTHER; note = 2'-O-methyladenosine
  modified_base 11: mod_base = OTHER; note = 2'-O-methyladenosine
  modified_base 12: mod_base = OTHER; note = 2'-fluoroadenosine
  modified_base 13: mod_base = OTHER; note = 2'-O-methyladenosine
  modified_base 14: mod_base = OTHER; note = 2'-fluorocytidine
  modified_base 15: mod_base = cm
  modified_base 16: mod_base = OTHER; note = 2'-fluoroadenosine
  modified_base 17: mod_base = OTHER; note = 2'-O-methyladenosine
  modified_base 18: mod_base = cm
  modified_base 19: mod_base = um
  modified_base 20: mod_base = gm
  modified_base 20^21: mod_base = OTHER; note = phosphorothioate linkage
  modified_base 21: mod_base = cm
  source 1..21: mol_type = other RNA
agacattcaaaaaccaactgc

SEQ ID NO: 396 - RNA, 21 nt, synthetic construct
  modified_base 1: mod_base = OTHER; note = 2'-O-methyladenosine
  modified_base 1^2: mod_base = OTHER; note = phosphorothioate linkage
  modified_base 2: mod_base = OTHER; note = 2'-fluoroguanosine
  modified_base 2^3: mod_base = OTHER; note = phosphorothioate linkage
  modified_base 3: mod_base = OTHER; note = 2'-O-methyladenosine
  modified_base 3^4: mod_base = OTHER; note = phosphorothioate linkage
  modified_base 4: mod_base = cm
  modified_base 5: mod_base = OTHER; note = 2'-O-methyladenosine
  modified_base 6: mod_base = um
  modified_base 7: mod_base = um
  modified_base 8: mod_base = cm
  modified_base 9: mod_base = OTHER; note = 2'-fluoroadenosine
  modified_base 10: mod_base = OTHER; note = 2'-O-methyladenosine
  modified_base 11: mod_base = OTHER; note = 2'-O-methyladenosine
  modified_base 12: mod_base = OTHER; note = 2'-fluoroadenosine
  modified_base 13: mod_base = OTHER; note = 2'-O-methyladenosine
  modified_base 14: mod_base = OTHER; note = 2'-fluorocytidine
  modified_base 15: mod_base = cm
  modified_base 16: mod_base = OTHER; note = 2'-fluoroadenosine
  modified_base 17: mod_base = OTHER; note = 2'-O-methyladenosine
  modified_base 18: mod_base = cm
  modified_base 19: mod_base = um
  modified_base 20: mod_base = gm
  modified_base 20^21: mod_base = OTHER; note = phosphorothioate linkage
  modified_base 21: mod_base = cm
  source 1..21: mol_type = other RNA
agacattcaaaaaccaactgc

SEQ ID NO: 397 - RNA, 21 nt, synthetic construct
  modified_base 1: mod_base = OTHER; note = 2'-O-methyladenosine
  modified_base 1^2: mod_base = OTHER; note = phosphorothioate linkage
  modified_base 2: mod_base = OTHER; note = 2'-fluoroguanosine
  modified_base 2^3: mod_base = OTHER; note = phosphorothioate linkage
  modified_base 3: mod_base = OTHER; note = 2'-O-methyladenosine
  modified_base 3^4: mod_base = OTHER; note = phosphorothioate linkage
  modified_base 4: mod_base = cm
  modified_base 5: mod_base = OTHER; note = 2'-O-methyladenosine
  modified_base 6: mod_base = um
  modified_base 7: mod_base = um
  modified_base 8: mod_base = OTHER; note = 2'-fluorocytidine
  modified_base 9: mod_base = OTHER; note = 2'-fluoroadenosine
  modified_base 10: mod_base = OTHER; note = 2'-O-methyladenosine
  modified_base 11: mod_base = OTHER; note = 2'-O-methyladenosine
  modified_base 12: mod_base = OTHER; note = 2'-fluoroadenosine
  modified_base 13: mod_base = OTHER; note = 2'-O-methyladenosine
  modified_base 14: mod_base = OTHER; note = 2'-fluorocytidine
  modified_base 15: mod_base = cm
  modified_base 16: mod_base = OTHER; note = 2'-fluoroadenosine
  modified_base 17: mod_base = OTHER; note = 2'-O-methyladenosine
  modified_base 18: mod_base = cm
  modified_base 19: mod_base = um
  modified_base 20: mod_base = gm
  modified_base 20^21: mod_base = OTHER; note = phosphorothioate linkage
  modified_base 21: mod_base = cm
  source 1..21: mol_type = other RNA
agacattcaaaaaccaactgc

SEQ ID NO: 398 - RNA, 21 nt, synthetic construct
  modified_base 1: mod_base = OTHER; note = 2'-O-methyladenosine
  modified_base 1^2: mod_base = OTHER; note = phosphorothioate linkage
  modified_base 2: mod_base = OTHER; note = 2'-fluorouridine
  modified_base 2^3: mod_base = OTHER; note = phosphorothioate linkage
  modified_base 3: mod_base = OTHER; note = 2'-O-methyladenosine
  modified_base 3^4: mod_base = OTHER; note = phosphorothioate linkage
  modified_base 4: mod_base = gm
  modified_base 5: mod_base = gm
  modified_base 6: mod_base = um
  modified_base 7: mod_base = um
  modified_base 8: mod_base = gm
  modified_base 9: mod_base = gm
  modified_base 10: mod_base = OTHER; note = 2'-O-methyladenosine
  modified_base 11: mod_base = um
  modified_base 12: mod_base = OTHER; note = 2'-fluoroadenosine
  modified_base 13: mod_base = cm
  modified_base 14: mod_base = OTHER; note = 2'-fluoroadenosine
  modified_base 15: mod_base = um
  modified_base 16: mod_base = OTHER; note = 2'-fluorocytidine
  modified_base 17: mod_base = OTHER; note = 2'-O-methyladenosine
  modified_base 18: mod_base = cm
  modified_base 19: mod_base = um
  modified_base 20: mod_base = gm
  modified_base 20^21: mod_base = OTHER; note = phosphorothioate linkage
  modified_base 21: mod_base = cm
  source 1..21: mol_type = other RNA
ataggttggatacatcactgc

SEQ ID NO: 399 - RNA, 21 nt, synthetic construct
  modified_base 1: mod_base = OTHER; note = 2'-O-methyladenosine
  modified_base 1^2: mod_base = OTHER; note = phosphorothioate linkage
  modified_base 2: mod_base = OTHER; note = 2'-fluorouridine
  modified_base 2^3: mod_base = OTHER; note = phosphorothioate linkage
  modified_base 3: mod_base = OTHER; note = 2'-O-methyladenosine
  modified_base 3^4: mod_base = OTHER; note = phosphorothioate linkage
  modified_base 4: mod_base = gm
  modified_base 5: mod_base = gm
  modified_base 6: mod_base = um
  modified_base 7: mod_base = OTHER; note = 2,3-seco-uridine
  modified_base 8: mod_base = gm
  modified_base 9: mod_base = gm
  modified_base 10: mod_base = OTHER; note = 2'-O-methyladenosine
  modified_base 11: mod_base = um
  modified_base 12: mod_base = OTHER; note = 2'-fluoroadenosine
  modified_base 13: mod_base = cm
  modified_base 14: mod_base = OTHER; note = 2'-fluoroadenosine
  modified_base 15: mod_base = um
  modified_base 16: mod_base = OTHER; note = 2'-fluorocytidine
  modified_base 17: mod_base = OTHER; note = 2'-O-methyladenosine
  modified_base 18: mod_base = cm
  modified_base 19: mod_base = um
  modified_base 20: mod_base = gm
  modified_base 20^21: mod_base = OTHER; note = phosphorothioate linkage
  modified_base 21: mod_base = cm
  source 1..21: mol_type = other RNA
ataggttggatacatcactgc

SEQ ID NO: 400 - RNA, 21 nt, synthetic construct
  modified_base 1: mod_base = um
  modified_base 1^2: mod_base = OTHER; note = phosphorothioate linkage
  modified_base 2: mod_base = OTHER; note = 2'-fluoroadenosine
  modified_base 2^3: mod_base = OTHER; note = phosphorothioate linkage
  modified_base 3: mod_base = gm
  modified_base 3^4: mod_base = OTHER; note = phosphorothioate linkage
  modified_base 4: mod_base = um
  modified_base 5: mod_base = OTHER; note = 2'-O-methyladenosine
  modified_base 6: mod_base = um
  modified_base 7: mod_base = um
  modified_base 8: mod_base = cm
  modified_base 9: mod_base = um
  modified_base 10: mod_base = gm
  modified_base 11: mod_base = cm
  modified_base 12: mod_base = OTHER; note = 2'-fluoroadenosine
  modified_base 13: mod_base = OTHER; note = 2'-O-methyladenosine
  modified_base 14: mod_base = OTHER; note = 2'-fluorocytidine
  modified_base 15: mod_base = OTHER; note = 2'-O-methyladenosine
  modified_base 16: mod_base = OTHER; note = 2'-fluorouridine
  modified_base 17: mod_base = cm
  modified_base 18: mod_base = um
  modified_base 19: mod_base = gm
  modified_base 20: mod_base = gm
  modified_base 20^21: mod_base = OTHER; note = phosphorothioate linkage
  modified_base 21: mod_base = cm
  source 1..21: mol_type = other RNA
tagtattctgcaacatctggc

SEQ ID NO: 401 - RNA, 21 nt, synthetic construct
  modified_base 1: mod_base = um
  modified_base 1^2: mod_base = OTHER; note = phosphorothioate linkage
  modified_base 2: mod_base = OTHER; note = 2'-fluoroadenosine
  modified_base 2^3: mod_base = OTHER; note = phosphorothioate linkage
  modified_base 3: mod_base = gm
  modified_base 3^4: mod_base = OTHER; note = phosphorothioate linkage
  modified_base 4: mod_base = um
  modified_base 5: mod_base = OTHER; note = 2'-O-methyladenosine
  modified_base 6: mod_base = um
  modified_base 7: mod_base = OTHER; note = 2,3-seco-uridine
  modified_base 8: mod_base = cm
  modified_base 9: mod_base = um
  modified_base 10: mod_base = gm
  modified_base 11: mod_base = cm
  modified_base 12: mod_base = OTHER; note = 2'-fluoroadenosine
  modified_base 13: mod_base = OTHER; note = 2'-O-methyladenosine
  modified_base 14: mod_base = OTHER; note = 2'-fluorocytidine
  modified_base 15: mod_base = OTHER; note = 2'-O-methyladenosine
  modified_base 16: mod_base = OTHER; note = 2'-fluorouridine
  modified_base 17: mod_base = cm
  modified_base 18: mod_base = um
  modified_base 19: mod_base = gm
  modified_base 20: mod_base = gm
  modified_base 20^21: mod_base = OTHER; note = phosphorothioate linkage
  modified_base 21: mod_base = cm
  source 1..21: mol_type = other RNA
tagtattctgcaacatctggc

SEQ ID NO: 402 - RNA, 21 nt, synthetic construct
  modified_base 1: mod_base = um
  modified_base 1^2: mod_base = OTHER; note = phosphorothioate linkage
  modified_base 2: mod_base = OTHER; note = 2'-fluoroadenosine
  modified_base 2^3: mod_base = OTHER; note = phosphorothioate linkage
  modified_base 3: mod_base = gm
  modified_base 3^4: mod_base = OTHER; note = phosphorothioate linkage
  modified_base 4: mod_base = um
  modified_base 5: mod_base = OTHER; note = 2'-O-methyladenosine
  modified_base 6: mod_base = OTHER; note = 2,3-seco-uridine
  modified_base 7: mod_base = OTHER; note = 2'-fluorouridine
  modified_base 8: mod_base = cm
  modified_base 9: mod_base = um
  modified_base 10: mod_base = gm
  modified_base 11: mod_base = cm
  modified_base 12: mod_base = OTHER; note = 2'-fluoroadenosine
  modified_base 13: mod_base = OTHER; note = 2'-O-methyladenosine
  modified_base 14: mod_base = OTHER; note = 2'-fluorocytidine
  modified_base 15: mod_base = OTHER; note = 2'-O-methyladenosine
  modified_base 16: mod_base = OTHER; note = 2'-fluorouridine
  modified_base 17: mod_base = cm
  modified_base 18: mod_base = um
  modified_base 19: mod_base = gm
  modified_base 20: mod_base = gm
  modified_base 20^21: mod_base = OTHER; note = phosphorothioate linkage
  modified_base 21: mod_base = cm
  source 1..21: mol_type = other RNA
tagtattctgcaacatctggc

SEQ ID NO: 403 - RNA, 21 nt, synthetic construct
  modified_base 1: mod_base = OTHER; note = 2'-O-methyladenosine
  modified_base 1^2: mod_base = OTHER; note = phosphorothioate linkage
  modified_base 2: mod_base = OTHER; note = 2'-fluoroguanosine
  modified_base 2^3: mod_base = OTHER; note = phosphorothioate linkage
  modified_base 3: mod_base = um
  modified_base 3^4: mod_base = OTHER; note = phosphorothioate linkage
  modified_base 4: mod_base = um
  modified_base 5: mod_base = um
  modified_base 6: mod_base = OTHER; note = 2'-O-methyladenosine
  modified_base 7: mod_base = um
  modified_base 8: mod_base = cm
  modified_base 9: mod_base = cm
  modified_base 10: mod_base = um
  modified_base 11: mod_base = um
  modified_base 12: mod_base = OTHER; note = 2'-fluoroadenosine
  modified_base 13: mod_base = OTHER; note = 2'-O-methyladenosine
  modified_base 14: mod_base = OTHER; note = 2'-fluoroadenosine
  modified_base 15: mod_base = OTHER; note = 2'-O-methyladenosine
  modified_base 16: mod_base = OTHER; note = 2'-fluoroguanosine
  modified_base 17: mod_base = gm
  modified_base 18: mod_base = OTHER; note = 2'-O-methyladenosine
  modified_base 19: mod_base = gm
  modified_base 20: mod_base = um
  modified_base 20^21: mod_base = OTHER; note = phosphorothioate linkage
  modified_base 21: mod_base = gm
  source 1..21: mol_type = other RNA
agtttatccttaaaaggagtg

SEQ ID NO: 404 - RNA, 21 nt, synthetic construct
  modified_base 1: mod_base = OTHER; note = 2'-O-methyladenosine
  modified_base 1^2: mod_base = OTHER; note = phosphorothioate linkage
  modified_base 2: mod_base = OTHER; note = 2'-fluoroguanosine
  modified_base 2^3: mod_base = OTHER; note = phosphorothioate linkage
  modified_base 3: mod_base = um
  modified_base 3^4: mod_base = OTHER; note = phosphorothioate linkage
  modified_base 4: mod_base = OTHER; note = 2'-fluorouridine
  modified_base 5: mod_base = um
  modified_base 6: mod_base = OTHER; note = 2'-O-methyladenosine
  modified_base 7: mod_base = um
  modified_base 8: mod_base = cm
  modified_base 9: mod_base = cm
  modified_base 10: mod_base = um
  modified_base 11: mod_base = um
  modified_base 12: mod_base = OTHER; note = 2'-fluoroadenosine
  modified_base 13: mod_base = OTHER; note = 2'-O-methyladenosine
  modified_base 14: mod_base = OTHER; note = 2'-fluoroadenosine
  modified_base 15: mod_base = OTHER; note = 2'-O-methyladenosine
  modified_base 16: mod_base = OTHER; note = 2'-fluoroguanosine
  modified_base 17: mod_base = gm
  modified_base 18: mod_base = OTHER; note = 2'-O-methyladenosine
  modified_base 19: mod_base = gm
  modified_base 20: mod_base = um
  modified_base 20^21: mod_base = OTHER; note = phosphorothioate linkage
  modified_base 21: mod_base = gm
  source 1..21: mol_type = other RNA
agtttatccttaaaaggagtg

SEQ ID NO: 405 - RNA, 21 nt, synthetic construct
  modified_base 1: mod_base = OTHER; note = 2'-O-methyladenosine
  modified_base 1^2: mod_base = OTHER; note = phosphorothioate linkage
  modified_base 2: mod_base = OTHER; note = 2'-fluoroguanosine
  modified_base 2^3: mod_base = OTHER; note = phosphorothioate linkage
  modified_base 3: mod_base = um
  modified_base 3^4: mod_base = OTHER; note = phosphorothioate linkage
  modified_base 4: mod_base = OTHER; note = 2'-fluorouridine
  modified_base 5: mod_base = um
  modified_base 6: mod_base = OTHER; note = 2'-O-methyladenosine
  modified_base 7: mod_base = um
  modified_base 8: mod_base = cm
  modified_base 9: mod_base = cm
  modified_base 10: mod_base = um
  modified_base 11: mod_base = um
  modified_base 12: mod_base = OTHER; note = 2'-fluoroadenosine
  modified_base 13: mod_base = OTHER; note = 2'-O-methyladenosine
  modified_base 14: mod_base = OTHER; note = 2'-fluoroadenosine
  modified_base 15: mod_base = OTHER; note = 2'-O-methyladenosine
  modified_base 16: mod_base = OTHER; note = 2'-fluoroguanosine
  modified_base 17: mod_base = gm
  modified_base 18: mod_base = OTHER; note = 2'-O-methyladenosine
  modified_base 19: mod_base = gm
  modified_base 20: mod_base = um
  modified_base 20^21: mod_base = OTHER; note = phosphorothioate linkage
  modified_base 21: mod_base = cm
  source 1..21: mol_type = other RNA
agtttatccttaaaaggagtc

SEQ ID NO: 406 - RNA, 21 nt, synthetic construct
  modified_base 1: mod_base = OTHER; note = 5-cyclopropyl phosphonate-2-O-methyluridine
  modified_base 2: mod_base = OTHER; note = 2'-fluoroguanosine
  modified_base 3: mod_base = OTHER; note = 2'-O-methyladenosine
  modified_base 4: mod_base = cm
  modified_base 5: mod_base = OTHER; note = 2'-O-methyladenosine
  modified_base 6: mod_base = um
  modified_base 7: mod_base = um
  modified_base 8: mod_base = cm
  modified_base 9: mod_base = OTHER; note = 2'-fluoroadenosine
  modified_base 10: mod_base = OTHER; note = 2'-O-methyladenosine
  modified_base 11: mod_base = OTHER; note = 2'-O-methyladenosine
  modified_base 12: mod_base = OTHER; note = 2'-fluoroadenosine
  modified_base 13: mod_base = OTHER; note = 2'-O-methyladenosine
  modified_base 14: mod_base = OTHER; note = 2'-fluorocytidine
  modified_base 15: mod_base = cm
  modified_base 16: mod_base = OTHER; note = 2'-fluoroadenosine
  modified_base 17: mod_base = OTHER; note = 2'-O-methyladenosine
  modified_base 18: mod_base = cm
  modified_base 19: mod_base = um
  modified_base 20: mod_base = gm
  modified_base 20^21: mod_base = OTHER; note = phosphorothioate linkage
  modified_base 21: mod_base = cm
  source 1..21: mol_type = other RNA
tgacattcaaaaaccaactgc

SEQ ID NO: 407 - RNA, 21 nt, synthetic construct
  modified_base 1: mod_base = OTHER; note = 5-cyclopropyl phosphonate-2-O-methyluridine
  modified_base 2: mod_base = OTHER; note = 2'-fluorouridine
  modified_base 3: mod_base = gm
  modified_base 4: mod_base = OTHER; note = 2'-O-methyladenosine
  modified_base 5: mod_base = cm
  modified_base 6: mod_base = OTHER; note = 2'-O-methyladenosine
  modified_base 7: mod_base = cm
  modified_base 8: mod_base = OTHER; note = 2'-fluorouridine
  modified_base 9: mod_base = OTHER; note = 2'-O-methyladenosine
  modified_base 10: mod_base = OTHER; note = 2'-fluoroadenosine
  modified_base 11: mod_base = um
  modified_base 12: mod_base = OTHER; note = 2'-fluorocytidine
  modified_base 13: mod_base = gm
  modified_base 14: mod_base = OTHER; note = 2'-fluoroadenosine
  modified_base 15: mod_base = um
  modified_base 16: mod_base = OTHER; note = 2'-fluorocytidine
  modified_base 17: mod_base = cm
  modified_base 18: mod_base = OTHER; note = 2'-O-methyladenosine
  modified_base 19: mod_base = cm
  modified_base 20: mod_base = um
  modified_base 20^21: mod_base = OTHER; note = phosphorothioate linkage
  modified_base 21: mod_base = gm
  source 1..21: mol_type = other RNA
ttgacactaatcgatccactg

SEQ ID NO: 408 - RNA, 21 nt, synthetic construct
  modified_base 1: mod_base = OTHER; note = 5-cyclopropyl phosphonate-2-O-methyladenosine
  modified_base 1^2: mod_base = OTHER; note = phosphorothioate linkage
  modified_base 2: mod_base = OTHER; note = 2'-fluoroguanosine
  modified_base 2^3: mod_base = OTHER; note = phosphorothioate linkage
  modified_base 3: mod_base = OTHER; note = 2'-O-methyladenosine
  modified_base 3^4: mod_base = OTHER; note = phosphorothioate linkage
  modified_base 4: mod_base = OTHER; note = 2'-fluorocytidine
  modified_base 5: mod_base = OTHER; note = 2'-O-methyladenosine
  modified_base 6: mod_base = OTHER; note = 2'-fluorouridine
  modified_base 7: mod_base = um
  modified_base 8: mod_base = OTHER; note = 2'-fluorocytidine
  modified_base 9: mod_base = OTHER; note = 2'-O-methyladenosine
  modified_base 10: mod_base = OTHER; note = 2'-fluoroadenosine
  modified_base 11: mod_base = OTHER; note = 2'-O-methyladenosine
  modified_base 12: mod_base = OTHER; note = 2'-fluoroadenosine
  modified_base 13: mod_base = OTHER; note = 2'-O-methyladenosine
  modified_base 14: mod_base = OTHER; note = 2'-fluorocytidine
  modified_base 15: mod_base = cm
  modified_base 16: mod_base = OTHER; note = 2'-fluoroadenosine
  modified_base 17: mod_base = OTHER; note = 2'-O-methyladenosine
  modified_base 18: mod_base = OTHER; note = 2'-fluorocytidine
  modified_base 19: mod_base = um
  modified_base 20: mod_base = OTHER; note = 2'-fluoroguanosine
  modified_base 20^21: mod_base = OTHER; note = phosphorothioate linkage
  modified_base 21: mod_base = cm
  source 1..21: mol_type = other RNA
agacattcaaaaaccaactgc

SEQ ID NO: 409 - RNA, 21 nt, synthetic construct
  modified_base 1: mod_base = OTHER; note = 5-cyclopropyl phosphonate-2-O-methyluridine
  modified_base 1^2: mod_base = OTHER; note = phosphorothioate linkage
  modified_base 2: mod_base = OTHER; note = 2'-fluoroguanosine
  modified_base 2^3: mod_base = OTHER; note = phosphorothioate linkage
  modified_base 3: mod_base = OTHER; note = 2'-O-methyladenosine
  modified_base 3^4: mod_base = OTHER; note = phosphorothioate linkage
  modified_base 4: mod_base = OTHER; note = 2'-fluorocytidine
  modified_base 5: mod_base = OTHER; note = 2'-O-methyladenosine
  modified_base 6: mod_base = OTHER; note = 2'-fluorouridine
  modified_base 7: mod_base = um
  modified_base 8: mod_base = OTHER; note = 2'-fluorocytidine
  modified_base 9: mod_base = OTHER; note = 2'-O-methyladenosine
  modified_base 10: mod_base = OTHER; note = 2'-fluoroadenosine
  modified_base 11: mod_base = OTHER; note = 2'-O-methyladenosine
  modified_base 12: mod_base = OTHER; note = 2'-fluoroadenosine
  modified_base 13: mod_base = OTHER; note = 2'-O-methyladenosine
  modified_base 14: mod_base = OTHER; note = 2'-fluorocytidine
  modified_base 15: mod_base = cm
  modified_base 16: mod_base = OTHER; note = 2'-fluoroadenosine
  modified_base 17: mod_base = OTHER; note = 2'-O-methyladenosine
  modified_base 18: mod_base = OTHER; note = 2'-fluorocytidine
  modified_base 19: mod_base = um
  modified_base 20: mod_base = OTHER; note = 2'-fluoroguanosine
  modified_base 20^21: mod_base = OTHER; note = phosphorothioate linkage
  modified_base 21: mod_base = cm
  source 1..21: mol_type = other RNA
tgacattcaaaaaccaactgc

SEQ ID NO: 410 - RNA, 21 nt, synthetic construct
  modified_base 1: mod_base = OTHER; note = 5-cyclopropyl phosphonate-2-O-methyluridine
  modified_base 2: mod_base = OTHER; note = 2'-fluoroguanosine
  modified_base 3: mod_base = OTHER; note = 2'-O-methyladenosine
  modified_base 4: mod_base = OTHER; note = 2'-fluorocytidine
  modified_base 5: mod_base = OTHER; note = 2'-O-methyladenosine
  modified_base 6: mod_base = OTHER; note = 2'-fluorouridine
  modified_base 7: mod_base = um
  modified_base 8: mod_base = OTHER; note = 2'-fluorocytidine
  modified_base 9: mod_base = OTHER; note = 2'-O-methyladenosine
  modified_base 10: mod_base = OTHER; note = 2'-fluoroadenosine
  modified_base 11: mod_base = OTHER; note = 2'-O-methyladenosine
  modified_base 12: mod_base = OTHER; note = 2'-fluoroadenosine
  modified_base 13: mod_base = OTHER; note = 2'-O-methyladenosine
  modified_base 14: mod_base = OTHER; note = 2'-fluorocytidine
  modified_base 15: mod_base = cm
  modified_base 16: mod_base = OTHER; note = 2'-fluoroadenosine
  modified_base 17: mod_base = OTHER; note = 2'-O-methyladenosine
  modified_base 18: mod_base = OTHER; note = 2'-fluorocytidine
  modified_base 19: mod_base = um
  modified_base 20: mod_base = OTHER; note = 2'-fluoroguanosine
  modified_base 20^21: mod_base = OTHER; note = phosphorothioate linkage
  modified_base 21: mod_base = cm
  source 1..21: mol_type = other RNA
tgacattcaaaaaccaactgc

SEQ ID NO: 411 - RNA, 21 nt, synthetic construct
  modified_base 1: mod_base = OTHER; note = 5-cyclopropyl phosphonate-2-O-methyluridine
  modified_base 1^2: mod_base = OTHER; note = phosphorothioate linkage
  modified_base 2: mod_base = OTHER; note = 2'-fluorouridine
  modified_base 2^3: mod_base = OTHER; note = phosphorothioate linkage
  modified_base 3: mod_base = gm
  modified_base 3^4: mod_base = OTHER; note = phosphorothioate linkage
  modified_base 4: mod_base = OTHER; note = 2'-fluoroadenosine
  modified_base 5: mod_base = cm
  modified_base 6: mod_base = OTHER; note = 2'-fluoroadenosine
  modified_base 7: mod_base = cm
  modified_base 8: mod_base = OTHER; note = 2'-fluorouridine
  modified_base 9: mod_base = OTHER; note = 2'-O-methyladenosine
  modified_base 10: mod_base = OTHER; note = 2'-fluoroadenosine
  modified_base 11: mod_base = um
  modified_base 12: mod_base = OTHER; note = 2'-fluorocytidine
  modified_base 13: mod_base = gm
  modified_base 14: mod_base = OTHER; note = 2'-fluoroadenosine
  modified_base 15: mod_base = um
  modified_base 16: mod_base = OTHER; note = 2'-fluorocytidine
  modified_base 17: mod_base = cm
  modified_base 18: mod_base = OTHER; note = 2'-fluoroadenosine
  modified_base 19: mod_base = cm
  modified_base 20: mod_base = OTHER; note = 2'-fluorouridine
  modified_base 20^21: mod_base = OTHER; note = phosphorothioate linkage
  modified_base 21: mod_base = gm
  source 1..21: mol_type = other RNA
ttgacactaatcgatccactg

SEQ ID NO: 412 - RNA, 21 nt, synthetic construct
  modified_base 1: mod_base = OTHER; note = 5-cyclopropyl phosphonate-2-O-methyluridine
  modified_base 2: mod_base = OTHER; note = 2'-fluorouridine
  modified_base 3: mod_base = gm
  modified_base 4: mod_base = OTHER; note = 2'-fluoroadenosine
  modified_base 5: mod_base = cm
  modified_base 6: mod_base = OTHER; note = 2'-fluoroadenosine
  modified_base 7: mod_base = cm
  modified_base 8: mod_base = OTHER; note = 2'-fluorouridine
  modified_base 9: mod_base = OTHER; note = 2'-O-methyladenosine
  modified_base 10: mod_base = OTHER; note = 2'-fluoroadenosine
  modified_base 11: mod_base = um
  modified_base 12: mod_base = OTHER; note = 2'-fluorocytidine
  modified_base 13: mod_base = gm
  modified_base 14: mod_base = OTHER; note = 2'-fluoroadenosine
  modified_base 15: mod_base = um
  modified_base 16: mod_base = OTHER; note = 2'-fluorocytidine
  modified_base 17: mod_base = cm
  modified_base 18: mod_base = OTHER; note = 2'-fluoroadenosine
  modified_base 19: mod_base = cm
  modified_base 20: mod_base = OTHER; note = 2'-fluorouridine
  modified_base 20^21: mod_base = OTHER; note = phosphorothioate linkage
  modified_base 21: mod_base = gm
  source 1..21: mol_type = other RNA
ttgacactaatcgatccactg

SEQ ID NO: 413 - RNA, 21 nt, synthetic construct
  modified_base 1: mod_base = OTHER; note = 5-cyclopropyl phosphonate-2-O-methyluridine
  modified_base 1^2: mod_base = OTHER; note = phosphorothioate linkage
  modified_base 2: mod_base = OTHER; note = 2'-fluorouridine
  modified_base 2^3: mod_base = OTHER; note = phosphorothioate linkage
  modified_base 3: mod_base = gm
  modified_base 3^4: mod_base = OTHER; note = phosphorothioate linkage
  modified_base 4: mod_base = OTHER; note = 2'-O-methyladenosine
  modified_base 5: mod_base = cm
  modified_base 6: mod_base = OTHER; note = 2'-O-methyladenosine
  modified_base 7: mod_base = cm
  modified_base 8: mod_base = OTHER; note = 2'-fluorouridine
  modified_base 9: mod_base = OTHER; note = 2'-O-methyladenosine
  modified_base 10: mod_base = OTHER; note = 2'-fluoroadenosine
  modified_base 11: mod_base = um
  modified_base 12: mod_base = OTHER; note = 2'-fluorocytidine
  modified_base 13: mod_base = gm
  modified_base 14: mod_base = OTHER; note = 2'-fluoroadenosine
  modified_base 15: mod_base = um
  modified_base 16: mod_base = OTHER; note = 2'-fluorocytidine
  modified_base 17: mod_base = cm
  modified_base 18: mod_base = OTHER; note = 2'-O-methyladenosine
  modified_base 19: mod_base = cm
  modified_base 20: mod_base = um
  modified_base 20^21: mod_base = OTHER; note = phosphorothioate linkage
  modified_base 21: mod_base = gm
  source 1..21: mol_type = other RNA
ttgacactaatcgatccactg

SEQ ID NO: 414 - RNA, 21 nt, synthetic construct
  modified_base 1: mod_base = um
  modified_base 1^2: mod_base = OTHER; note = phosphorothioate linkage
  modified_base 2: mod_base = OTHER; note = 2'-fluoroadenosine
  modified_base 2^3: mod_base = OTHER; note = phosphorothioate linkage
  modified_base 3: mod_base = OTHER; note = 2'-O-methyladenosine
  modified_base 3^4: mod_base = OTHER; note = phosphorothioate linkage
  modified_base 4: mod_base = cm
  modified_base 5: mod_base = OTHER; note = 2'-O-methyladenosine
  modified_base 6: mod_base = um
  modified_base 7: mod_base = cm
  modified_base 8: mod_base = um
  modified_base 9: mod_base = gm
  modified_base 10: mod_base = gm
  modified_base 11: mod_base = cm
  modified_base 12: mod_base = OTHER; note = 2'-fluoroadenosine
  modified_base 13: mod_base = cm
  modified_base 14: mod_base = OTHER; note = 2'-fluorouridine
  modified_base 15: mod_base = cm
  modified_base 16: mod_base = OTHER; note = 2'-fluorocytidine
  modified_base 17: mod_base = OTHER; note = 2'-O-methyladenosine
  modified_base 18: mod_base = cm
  modified_base 19: mod_base = OTHER; note = 2'-O-methyladenosine
  modified_base 20: mod_base = um
  modified_base 20^21: mod_base = OTHER; note = phosphorothioate linkage
  modified_base 21: mod_base = cm
  source 1..21: mol_type = other RNA
taacatctggcactccacatc

SEQ ID NO: 415 - RNA, 21 nt, synthetic construct
  modified_base 1: mod_base = OTHER; note = 5-cyclopropyl phosphonate-2-O-methyluridine
  modified_base 1^2: mod_base = OTHER; note = phosphorothioate linkage
  modified_base 2: mod_base = OTHER; note = 2'-fluoroadenosine
  modified_base 2^3: mod_base = OTHER; note = phosphorothioate linkage
  modified_base 3: mod_base = OTHER; note = 2'-O-methyladenosine
  modified_base 3^4: mod_base = OTHER; note = phosphorothioate linkage
  modified_base 4: mod_base = cm
  modified_base 5: mod_base = OTHER; note = 2'-O-methyladenosine
  modified_base 6: mod_base = um
  modified_base 7: mod_base = cm
  modified_base 8: mod_base = um
  modified_base 9: mod_base = gm
  modified_base 10: mod_base = gm
  modified_base 11: mod_base = cm
  modified_base 12: mod_base = OTHER; note = 2'-fluoroadenosine
  modified_base 13: mod_base = cm
  modified_base 14: mod_base = OTHER; note = 2'-fluorouridine
  modified_base 15: mod_base = cm
  modified_base 16: mod_base = OTHER; note = 2'-fluorocytidine
  modified_base 17: mod_base = OTHER; note = 2'-O-methyladenosine
  modified_base 18: mod_base = cm
  modified_base 19: mod_base = OTHER; note = 2'-O-methyladenosine
  modified_base 20: mod_base = um
  modified_base 20^21: mod_base = OTHER; note = phosphorothioate linkage
  modified_base 21: mod_base = cm
  source 1..21: mol_type = other RNA
taacatctggcactccacatc

SEQ ID NO: 416 - RNA, 21 nt, synthetic construct
  modified_base 1: mod_base = OTHER; note = 5-cyclopropyl phosphonate-2-O-methyluridine
  modified_base 1^2: mod_base = OTHER; note = phosphorothioate linkage
  modified_base 2: mod_base = OTHER; note = 2'-fluorouridine
  modified_base 2^3: mod_base = OTHER; note = phosphorothioate linkage
  modified_base 3: mod_base = OTHER; note = 2'-O-methyladenosine
  modified_base 3^4: mod_base = OTHER; note = phosphorothioate linkage
  modified_base 4: mod_base = OTHER; note = 2'-fluoroguanosine
  modified_base 5: mod_base = gm
  modified_base 6: mod_base = OTHER; note = 2'-fluorouridine
  modified_base 7: mod_base = um
  modified_base 8: mod_base = OTHER; note = 2'-fluoroguanosine
  modified_base 9: mod_base = gm
  modified_base 10: mod_base = OTHER; note = 2'-fluoroadenosine
  modified_base 11: mod_base = um
  modified_base 12: mod_base = OTHER; note = 2'-fluoroadenosine
  modified_base 13: mod_base = cm
  modified_base 14: mod_base = OTHER; note = 2'-fluoroadenosine
  modified_base 15: mod_base = um
  modified_base 16: mod_base = OTHER; note = 2'-fluorocytidine
  modified_base 17: mod_base = OTHER; note = 2'-O-methyladenosine
  modified_base 18: mod_base = OTHER; note = 2'-fluorocytidine
  modified_base 19: mod_base = um
  modified_base 20: mod_base = OTHER; note = 2'-fluoroguanosine
  modified_base 20^21: mod_base = OTHER; note = phosphorothioate linkage
  modified_base 21: mod_base = cm
  source 1..21: mol_type = other RNA
ttaggttggatacatcactgc

SEQ ID NO: 417 - RNA, 21 nt, synthetic construct
  modified_base 1: mod_base = um
  modified_base 1^2: mod_base = OTHER; note = phosphorothioate linkage
  modified_base 2: mod_base = OTHER; note = 2'-fluorouridine
  modified_base 2^3: mod_base = OTHER; note = phosphorothioate linkage
  modified_base 3: mod_base = OTHER; note = 2'-O-methyladenosine
  modified_base 3^4: mod_base = OTHER; note = phosphorothioate linkage
  modified_base 4: mod_base = OTHER; note = 2'-fluoroguanosine
  modified_base 5: mod_base = gm
  modified_base 6: mod_base = OTHER; note = 2'-fluorouridine
  modified_base 7: mod_base = um
  modified_base 8: mod_base = gm
  modified_base 9: mod_base = gm
  modified_base 10: mod_base = OTHER; note = 2'-O-methyladenosine
  modified_base 11: mod_base = um
  modified_base 12: mod_base = OTHER; note = 2'-fluoroadenosine
  modified_base 13: mod_base = cm
  modified_base 14: mod_base = OTHER; note = 2'-fluoroadenosine
  modified_base 15: mod_base = um
  modified_base 16: mod_base = OTHER; note = 2'-fluorocytidine
  modified_base 17: mod_base = OTHER; note = 2'-O-methyladenosine
  modified_base 18: mod_base = OTHER; note = 2'-fluorocytidine
  modified_base 19: mod_base = um
  modified_base 20: mod_base = gm
  modified_base 20^21: mod_base = OTHER; note = phosphorothioate linkage
  modified_base 21: mod_base = cm
  source 1..21: mol_type = other RNA
ttaggttggatacatcactgc

SEQ ID NO: 418 - RNA, 21 nt, synthetic construct
  modified_base 1: mod_base = OTHER; note = 5-cyclopropyl phosphonate-2-O-methyluridine
  modified_base 1^2: mod_base = OTHER; note = phosphorothioate linkage
  modified_base 2: mod_base = OTHER; note = 2'-fluorouridine
  modified_base 2^3: mod_base = OTHER; note = phosphorothioate linkage
  modified_base 3: mod_base = OTHER; note = 2'-O-methyladenosine
  modified_base 3^4: mod_base = OTHER; note = phosphorothioate linkage
  modified_base 4: mod_base = OTHER; note = 2'-fluoroguanosine
  modified_base 5: mod_base = gm
  modified_base 6: mod_base = OTHER; note = 2'-fluorouridine
  modified_base 7: mod_base = um
  modified_base 8: mod_base = gm
  modified_base 9: mod_base = gm
  modified_base 10: mod_base = OTHER; note = 2'-O-methyladenosine
  modified_base 11: mod_base = um
  modified_base 12: mod_base = OTHER; note = 2'-fluoroadenosine
  modified_base 13: mod_base = cm
  modified_base 14: mod_base = OTHER; note = 2'-fluoroadenosine
  modified_base 15: mod_base = um
  modified_base 16: mod_base = OTHER; note = 2'-fluorocytidine
  modified_base 17: mod_base = OTHER; note = 2'-O-methyladenosine
  modified_base 18: mod_base = OTHER; note = 2'-fluorocytidine
  modified_base 19: mod_base = um
  modified_base 20: mod_base = gm
  modified_base 20^21: mod_base = OTHER; note = phosphorothioate linkage
  modified_base 21: mod_base = cm
  source 1..21: mol_type = other RNA
ttaggttggatacatcactgc

SEQ ID NO: 419 - RNA, 21 nt, synthetic construct
  modified_base 1: mod_base = OTHER; note = 5-cyclopropyl phosphonate-2-O-methyluridine
  modified_base 2: mod_base = OTHER; note = 2'-fluorouridine
  modified_base 3: mod_base = OTHER; note = 2'-O-methyladenosine
  modified_base 4: mod_base = OTHER; note = 2'-fluoroguanosine
  modified_base 5: mod_base = gm
  modified_base 6: mod_base = OTHER; note = 2'-fluorouridine
  modified_base 7: mod_base = um
  modified_base 8: mod_base = gm
  modified_base 9: mod_base = gm
  modified_base 10: mod_base = OTHER; note = 2'-O-methyladenosine
  modified_base 11: mod_base = um
  modified_base 12: mod_base = OTHER; note = 2'-fluoroadenosine
  modified_base 13: mod_base = cm
  modified_base 14: mod_base = OTHER; note = 2'-fluoroadenosine
  modified_base 15: mod_base = um
  modified_base 16: mod_base = OTHER; note = 2'-fluorocytidine
  modified_base 17: mod_base = OTHER; note = 2'-O-methyladenosine
  modified_base 18: mod_base = OTHER; note = 2'-fluorocytidine
  modified_base 19: mod_base = um
  modified_base 20: mod_base = gm
  modified_base 20^21: mod_base = OTHER; note = phosphorothioate linkage
  modified_base 21: mod_base = cm
  source 1..21: mol_type = other RNA
ttaggttggatacatcactgc

SEQ ID NO: 420 - RNA, 21 nt, synthetic construct
  modified_base 1: mod_base = OTHER; note = 5-cyclopropyl phosphonate-2-O-methyluridine
  modified_base 1^2: mod_base = OTHER; note = phosphorothioate linkage
  modified_base 2: mod_base = OTHER; note = 2'-fluoroguanosine
  modified_base 2^3: mod_base = OTHER; note = phosphorothioate linkage
  modified_base 3: mod_base = um
  modified_base 3^4: mod_base = OTHER; note = phosphorothioate linkage
  modified_base 4: mod_base = OTHER; note = 2'-fluorouridine
  modified_base 5: mod_base = um
  modified_base 6: mod_base = OTHER; note = 2'-O-methyladenosine
  modified_base 7: mod_base = um
  modified_base 8: mod_base = cm
  modified_base 9: mod_base = cm
  modified_base 10: mod_base = um
  modified_base 11: mod_base = um
  modified_base 12: mod_base = OTHER; note = 2'-fluoroadenosine
  modified_base 13: mod_base = OTHER; note = 2'-O-methyladenosine
  modified_base 14: mod_base = OTHER; note = 2'-fluoroadenosine
  modified_base 15: mod_base = OTHER; note = 2'-O-methyladenosine
  modified_base 16: mod_base = OTHER; note = 2'-fluoroguanosine
  modified_base 17: mod_base = gm
  modified_base 18: mod_base = OTHER; note = 2'-O-methyladenosine
  modified_base 19: mod_base = gm
  modified_base 20: mod_base = um
  modified_base 20^21: mod_base = OTHER; note = phosphorothioate linkage
  modified_base 21: mod_base = gm
  source 1..21: mol_type = other RNA
tgtttatccttaaaaggagtg

SEQ ID NO: 421 - RNA, 21 nt, synthetic construct
  modified_base 1: mod_base = OTHER; note = 5-cyclopropyl phosphonate-2-O-methyluridine
  modified_base 2: mod_base = OTHER; note = 2'-fluoroguanosine
  modified_base 3: mod_base = um
  modified_base 4: mod_base = OTHER; note = 2'-fluorouridine
  modified_base 5: mod_base = um
  modified_base 6: mod_base = OTHER; note = 2'-O-methyladenosine
  modified_base 7: mod_base = um
  modified_base 8: mod_base = cm
  modified_base 9: mod_base = cm
  modified_base 10: mod_base = um
  modified_base 11: mod_base = um
  modified_base 12: mod_base = OTHER; note = 2'-fluoroadenosine
  modified_base 13: mod_base = OTHER; note = 2'-O-methyladenosine
  modified_base 14: mod_base = OTHER; note = 2'-fluoroadenosine
  modified_base 15: mod_base = OTHER; note = 2'-O-methyladenosine
  modified_base 16: mod_base = OTHER; note = 2'-fluoroguanosine
  modified_base 17: mod_base = gm
  modified_base 18: mod_base = OTHER; note = 2'-O-methyladenosine
  modified_base 19: mod_base = gm
  modified_base 20: mod_base = um
  modified_base 20^21: mod_base = OTHER; note = phosphorothioate linkage
  modified_base 21: mod_base = gm
  source 1..21: mol_type = other RNA
tgtttatccttaaaaggagtg

SEQ ID NO: 422 - RNA, 21 nt, synthetic construct
  modified_base 1: mod_base = OTHER; note = 5-cyclopropyl phosphonate-2-O-methyluridine
  modified_base 1^2: mod_base = OTHER; note = phosphorothioate linkage
  modified_base 2: mod_base = OTHER; note = 2'-fluoroguanosine
  modified_base 2^3: mod_base = OTHER; note = phosphorothioate linkage
  modified_base 3: mod_base = um
  modified_base 3^4: mod_base = OTHER; note = phosphorothioate linkage
  modified_base 4: mod_base = OTHER; note = 2'-fluorouridine
  modified_base 5: mod_base = um
  modified_base 6: mod_base = OTHER; note = 2'-fluoroadenosine
  modified_base 7: mod_base = um
  modified_base 8: mod_base = OTHER; note = 2'-fluorocytidine
  modified_base 9: mod_base = cm
  modified_base 10: mod_base = OTHER; note = 2'-fluorouridine
  modified_base 11: mod_base = um
  modified_base 12: mod_base = OTHER; note = 2'-fluoroadenosine
  modified_base 13: mod_base = OTHER; note = 2'-O-methyladenosine
  modified_base 14: mod_base = OTHER; note = 2'-fluoroadenosine
  modified_base 15: mod_base = OTHER; note = 2'-O-methyladenosine
  modified_base 16: mod_base = OTHER; note = 2'-fluoroguanosine
  modified_base 17: mod_base = gm
  modified_base 18: mod_base = OTHER; note = 2'-fluoroadenosine
  modified_base 19: mod_base = gm
  modified_base 20: mod_base = OTHER; note = 2'-fluorouridine
  modified_base 20^21: mod_base = OTHER; note = phosphorothioate linkage
  modified_base 21: mod_base = gm
  source 1..21: mol_type = other RNA
tgtttatccttaaaaggagtg

SEQ ID NO: 423 - RNA, 21 nt, synthetic construct
  modified_base 1: mod_base = OTHER; note = 5-cyclopropyl phosphonate-2-O-methyladenosine
  modified_base 1^2: mod_base = OTHER; note = phosphorothioate linkage
  modified_base 2: mod_base = OTHER; note = 2'-fluoroguanosine
  modified_base 2^3: mod_base = OTHER; note = phosphorothioate linkage
  modified_base 3: mod_base = OTHER; note = 2'-O-methyladenosine
  modified_base 3^4: mod_base = OTHER; note = phosphorothioate linkage
  modified_base 4: mod_base = cm
  modified_base 5: mod_base = OTHER; note = 2'-O-methyladenosine
  modified_base 6: mod_base = um
  modified_base 7: mod_base = um
  modified_base 8: mod_base = cm
  modified_base 9: mod_base = OTHER; note = 2'-fluoroadenosine
  modified_base 10: mod_base = OTHER; note = 2'-O-methyladenosine
  modified_base 11: mod_base = OTHER; note = 2'-O-methyladenosine
  modified_base 12: mod_base = OTHER; note = 2'-fluoroadenosine
  modified_base 13: mod_base = OTHER; note = 2'-O-methyladenosine
  modified_base 14: mod_base = OTHER; note = 2'-fluorocytidine
  modified_base 15: mod_base = cm
  modified_base 16: mod_base = OTHER; note = 2'-fluoroadenosine
  modified_base 17: mod_base = OTHER; note = 2'-O-methyladenosine
  modified_base 18: mod_base = cm
  modified_base 19: mod_base = um
  modified_base 20: mod_base = gm
  modified_base 20^21: mod_base = OTHER; note = phosphorothioate linkage
  modified_base 21: mod_base = cm
  source 1..21: mol_type = other RNA
agacattcaaaaaccaactgc

SEQ ID NO: 424 - RNA, 21 nt, synthetic construct
  modified_base 1: mod_base = OTHER; note = 5-cyclopropyl phosphonate-2-O-methyluridine
  modified_base 1^2: mod_base = OTHER; note = phosphorothioate linkage
  modified_base 2: mod_base = OTHER; note = 2'-fluoroguanosine
  modified_base 2^3: mod_base = OTHER; note = phosphorothioate linkage
  modified_base 3: mod_base = OTHER; note = 2'-O-methyladenosine
  modified_base 3^4: mod_base = OTHER; note = phosphorothioate linkage
  modified_base 4: mod_base = cm
  modified_base 5: mod_base = OTHER; note = 2'-O-methyladenosine
  modified_base 6: mod_base = um
  modified_base 7: mod_base = um
  modified_base 8: mod_base = cm
  modified_base 9: mod_base = OTHER; note = 2'-fluoroadenosine
  modified_base 10: mod_base = OTHER; note = 2'-O-methyladenosine
  modified_base 11: mod_base = OTHER; note = 2'-O-methyladenosine
  modified_base 12: mod_base = OTHER; note = 2'-fluoroadenosine
  modified_base 13: mod_base = OTHER; note = 2'-O-methyladenosine
  modified_base 14: mod_base = OTHER; note = 2'-fluorocytidine
  modified_base 15: mod_base = cm
  modified_base 16: mod_base = OTHER; note = 2'-fluoroadenosine
  modified_base 17: mod_base = OTHER; note = 2'-O-methyladenosine
  modified_base 18: mod_base = cm
  modified_base 19: mod_base = um
  modified_base 20: mod_base = gm
  modified_base 20^21: mod_base = OTHER; note = phosphorothioate linkage
  modified_base 21: mod_base = cm
  source 1..21: mol_type = other RNA
tgacattcaaaaaccaactgc

SEQ ID NO: 425 - RNA, 21 nt, synthetic construct
  modified_base 1: mod_base = um
  modified_base 1^2: mod_base = OTHER; note = phosphorothioate linkage
  modified_base 2: mod_base = OTHER; note = 2'-fluorouridine
  modified_base 2^3: mod_base = OTHER; note = phosphorothioate linkage
  modified_base 3: mod_base = OTHER; note = 2'-O-methyladenosine
  modified_base 3^4: mod_base = OTHER; note = phosphorothioate linkage
  modified_base 4: mod_base = OTHER; note = 2'-fluoroguanosine
  modified_base 5: mod_base = gm
  modified_base 6: mod_base = OTHER; note = 2'-fluorouridine
  modified_base 7: mod_base = um
  modified_base 8: mod_base = OTHER; note = 2'-fluoroguanosine
  modified_base 9: mod_base = gm
  modified_base 10: mod_base = OTHER; note = 2'-fluoroadenosine
  modified_base 11: mod_base = um
  modified_base 12: mod_base = OTHER; note = 2'-fluoroadenosine
  modified_base 13: mod_base = cm
  modified_base 14: mod_base = OTHER; note = 2'-fluoroadenosine
  modified_base 15: mod_base = um
  modified_base 16: mod_base = OTHER; note = 2'-fluorocytidine
  modified_base 17: mod_base = OTHER; note = 2'-O-methyladenosine
  modified_base 18: mod_base = OTHER; note = 2'-fluorocytidine
  modified_base 19: mod_base = um
  modified_base 20: mod_base = OTHER; note = 2'-fluoroguanosine
  modified_base 20^21: mod_base = OTHER; note = phosphorothioate linkage
  modified_base 21: mod_base = cm
  source 1..21: mol_type = other RNA
ttaggttggatacatcactgc

SEQ ID NO: 426 - RNA, 21 nt, synthetic construct
  modified_base 1: mod_base = OTHER; note = 5-cyclopropyl phosphonate-2-O-methyladenosine
  modified_base 1^2: mod_base = OTHER; note = phosphorothioate linkage
  modified_base 2: mod_base = OTHER; note = 2'-fluorouridine
  modified_base 2^3: mod_base = OTHER; note = phosphorothioate linkage
  modified_base 3: mod_base = OTHER; note = 2'-O-methyladenosine
  modified_base 3^4: mod_base = OTHER; note = phosphorothioate linkage
  modified_base 4: mod_base = OTHER; note = 2'-fluoroguanosine
  modified_base 5: mod_base = gm
  modified_base 6: mod_base = OTHER; note = 2'-fluorouridine
  modified_base 7: mod_base = um
  modified_base 8: mod_base = OTHER; note = 2'-fluoroguanosine
  modified_base 9: mod_base = gm
  modified_base 10: mod_base = OTHER; note = 2'-fluoroadenosine
  modified_base 11: mod_base = um
  modified_base 12: mod_base = OTHER; note = 2'-fluoroadenosine
  modified_base 13: mod_base = cm
  modified_base 14: mod_base = OTHER; note = 2'-fluoroadenosine
  modified_base 15: mod_base = um
  modified_base 16: mod_base = OTHER; note = 2'-fluorocytidine
  modified_base 17: mod_base = OTHER; note = 2'-O-methyladenosine
  modified_base 18: mod_base = OTHER; note = 2'-fluorocytidine
  modified_base 19: mod_base = um
  modified_base 20: mod_base = OTHER; note = 2'-fluoroguanosine
  modified_base 20^21: mod_base = OTHER; note = phosphorothioate linkage
  modified_base 21: mod_base = cm
  source 1..21: mol_type = other RNA
ataggttggatacatcactgc

SEQ ID NO: 427 - RNA, 21 nt, synthetic construct
  modified_base 1: mod_base = OTHER; note = 2'-O-methyladenosine
  modified_base 1^2: mod_base = OTHER; note = phosphorothioate linkage
  modified_base 2: mod_base = OTHER; note = 2'-fluorouridine
  modified_base 2^3: mod_base = OTHER; note = phosphorothioate linkage
  modified_base 3: mod_base = OTHER; note = 2'-O-methyladenosine
  modified_base 4: mod_base = gm
  modified_base 5: mod_base = gm
  modified_base 6: mod_base = um
  modified_base 7: mod_base = um
  modified_base 8: mod_base = gm
  modified_base 9: mod_base = gm
  modified_base 10: mod_base = OTHER; note = 2'-O-methyladenosine
  modified_base 11: mod_base = um
  modified_base 12: mod_base = OTHER; note = 2'-fluoroadenosine
  modified_base 13: mod_base = cm
  modified_base 14: mod_base = OTHER; note = 2'-fluoroadenosine
  modified_base 15: mod_base = um
  modified_base 16: mod_base = OTHER; note = 2'-fluorocytidine
  modified_base 17: mod_base = OTHER; note = 2'-O-methyladenosine
  modified_base 18: mod_base = cm
  modified_base 19: mod_base = um
  modified_base 19^20: mod_base = OTHER; note = phosphorothioate linkage
  modified_base 20: mod_base = gm
  modified_base 20^21: mod_base = OTHER; note = phosphorothioate linkage
  modified_base 21: mod_base = cm
  source 1..21: mol_type = other RNA
ataggttggatacatcactgc

SEQ ID NO: 428 - RNA, 21 nt, synthetic construct
  modified_base 1: mod_base = OTHER; note = 5-cyclopropyl phosphonate-2-O-methyladenosine
  modified_base 1^2: mod_base = OTHER; note = phosphorothioate linkage
  modified_base 2: mod_base = OTHER; note = 2'-fluorouridine
  modified_base 2^3: mod_base = OTHER; note = phosphorothioate linkage
  modified_base 3: mod_base = OTHER; note = 2'-O-methyladenosine
  modified_base 4: mod_base = gm
  modified_base 5: mod_base = gm
  modified_base 6: mod_base = um
  modified_base 7: mod_base = um
  modified_base 8: mod_base = gm
  modified_base 9: mod_base = gm
  modified_base 10: mod_base = OTHER; note = 2'-O-methyladenosine
  modified_base 11: mod_base = um
  modified_base 12: mod_base = OTHER; note = 2'-fluoroadenosine
  modified_base 13: mod_base = cm
  modified_base 14: mod_base = OTHER; note = 2'-fluoroadenosine
  modified_base 15: mod_base = um
  modified_base 16: mod_base = OTHER; note = 2'-fluorocytidine
  modified_base 17: mod_base = OTHER; note = 2'-O-methyladenosine
  modified_base 18: mod_base = cm
  modified_base 19: mod_base = um
  modified_base 19^20: mod_base = OTHER; note = phosphorothioate linkage
  modified_base 20: mod_base = gm
  modified_base 20^21: mod_base = OTHER; note = phosphorothioate linkage
  modified_base 21: mod_base = cm
  source 1..21: mol_type = other RNA
ataggttggatacatcactgc

SEQ ID NO: 429 - RNA, 21 nt, synthetic construct
  modified_base 1: mod_base = OTHER; note = 5-cyclopropyl phosphonate-2-O-methyladenosine
  modified_base 1^2: mod_base = OTHER; note = phosphorothioate linkage
  modified_base 2: mod_base = OTHER; note = 2'-fluorouridine
  modified_base 2^3: mod_base = OTHER; note = phosphorothioate linkage
  modified_base 3: mod_base = OTHER; note = 2'-O-methyladenosine
  modified_base 4: mod_base = OTHER; note = 2'-fluoroguanosine
  modified_base 5: mod_base = gm
  modified_base 6: mod_base = um
  modified_base 7: mod_base = um
  modified_base 8: mod_base = gm
  modified_base 9: mod_base = gm
  modified_base 10: mod_base = OTHER; note = 2'-O-methyladenosine
  modified_base 11: mod_base = um
  modified_base 12: mod_base = OTHER; note = 2'-fluoroadenosine
  modified_base 13: mod_base = cm
  modified_base 14: mod_base = OTHER; note = 2'-fluoroadenosine
  modified_base 15: mod_base = um
  modified_base 16: mod_base = OTHER; note = 2'-fluorocytidine
  modified_base 17: mod_base = OTHER; note = 2'-O-methyladenosine
  modified_base 18: mod_base = cm
  modified_base 19: mod_base = um
  modified_base 19^20: mod_base = OTHER; note = phosphorothioate linkage
  modified_base 20: mod_base = gm
  modified_base 20^21: mod_base = OTHER; note = phosphorothioate linkage
  modified_base 21: mod_base = cm
  source 1..21: mol_type = other RNA
ataggttggatacatcactgc

SEQ ID NO: 430 - RNA, 21 nt, synthetic construct
  modified_base 1: mod_base = OTHER; note = 5-cyclopropyl phosphonate-2-O-methyladenosine
  modified_base 2: mod_base = OTHER; note = 2'-fluorouridine
  modified_base 3: mod_base = OTHER; note = 2'-O-methyladenosine
  modified_base 4: mod_base = OTHER; note = 2'-fluoroguanosine
  modified_base 5: mod_base = gm
  modified_base 6: mod_base = um
  modified_base 7: mod_base = um
  modified_base 8: mod_base = gm
  modified_base 9: mod_base = gm
  modified_base 10: mod_base = OTHER; note = 2'-O-methyladenosine
  modified_base 11: mod_base = um
  modified_base 12: mod_base = OTHER; note = 2'-fluoroadenosine
  modified_base 13: mod_base = cm
  modified_base 14: mod_base = OTHER; note = 2'-fluoroadenosine
  modified_base 15: mod_base = um
  modified_base 16: mod_base = OTHER; note = 2'-fluorocytidine
  modified_base 17: mod_base = OTHER; note = 2'-O-methyladenosine
  modified_base 18: mod_base = cm
  modified_base 19: mod_base = um
  modified_base 19^20: mod_base = OTHER; note = phosphorothioate linkage
  modified_base 20: mod_base = gm
  modified_base 20^21: mod_base = OTHER; note = phosphorothioate linkage
  modified_base 21: mod_base = cm
  source 1..21: mol_type = other RNA
ataggttggatacatcactgc

SEQ ID NO: 431 - RNA, 21 nt, synthetic construct
  modified_base 1: mod_base = OTHER; note = 5-cyclopropyl phosphonate-2-O-methyladenosine
  modified_base 1^2: mod_base = OTHER; note = phosphorothioate linkage
  modified_base 2: mod_base = OTHER; note = 2'-fluorouridine
  modified_base 2^3: mod_base = OTHER; note = phosphorothioate linkage
  modified_base 3: mod_base = OTHER; note = 2'-O-methyladenosine
  modified_base 4: mod_base = gm
  modified_base 5: mod_base = OTHER; note = 2'-fluoroguanosine
  modified_base 6: mod_base = um
  modified_base 7: mod_base = um
  modified_base 8: mod_base = gm
  modified_base 9: mod_base = gm
  modified_base 10: mod_base = OTHER; note = 2'-O-methyladenosine
  modified_base 11: mod_base = um
  modified_base 12: mod_base = OTHER; note = 2'-fluoroadenosine
  modified_base 13: mod_base = cm
  modified_base 14: mod_base = OTHER; note = 2'-fluoroadenosine
  modified_base 15: mod_base = um
  modified_base 16: mod_base = OTHER; note = 2'-fluorocytidine
  modified_base 17: mod_base = OTHER; note = 2'-O-methyladenosine
  modified_base 18: mod_base = cm
  modified_base 19: mod_base = um
  modified_base 19^20: mod_base = OTHER; note = phosphorothioate linkage
  modified_base 20: mod_base = gm
  modified_base 20^21: mod_base = OTHER; note = phosphorothioate linkage
  modified_base 21: mod_base = cm
  source 1..21: mol_type = other RNA
ataggttggatacatcactgc

SEQ ID NO: 432 - RNA, 21 nt, synthetic construct
  modified_base 1: mod_base = OTHER; note = 5-cyclopropyl phosphonate-2-O-methyladenosine
  modified_base 1^2: mod_base = OTHER; note = phosphorothioate linkage
  modified_base 2: mod_base = OTHER; note = 2'-fluorouridine
  modified_base 2^3: mod_base = OTHER; note = phosphorothioate linkage
  modified_base 3: mod_base = OTHER; note = 2'-O-methyladenosine
  modified_base 4: mod_base = gm
  modified_base 5: mod_base = gm
  modified_base 6: mod_base = um
  modified_base 7: mod_base = OTHER; note = 2'-fluorouridine
  modified_base 8: mod_base = gm
  modified_base 9: mod_base = gm
  modified_base 10: mod_base = OTHER; note = 2'-O-methyladenosine
  modified_base 11: mod_base = um
  modified_base 12: mod_base = OTHER; note = 2'-fluoroadenosine
  modified_base 13: mod_base = cm
  modified_base 14: mod_base = OTHER; note = 2'-fluoroadenosine
  modified_base 15: mod_base = um
  modified_base 16: mod_base = OTHER; note = 2'-fluorocytidine
  modified_base 17: mod_base = OTHER; note = 2'-O-methyladenosine
  modified_base 18: mod_base = cm
  modified_base 19: mod_base = um
  modified_base 19^20: mod_base = OTHER; note = phosphorothioate linkage
  modified_base 20: mod_base = gm
  modified_base 20^21: mod_base = OTHER; note = phosphorothioate linkage
  modified_base 21: mod_base = cm
  source 1..21: mol_type = other RNA
ataggttggatacatcactgc

SEQ ID NO: 433 - RNA, 21 nt, synthetic construct
  modified_base 1: mod_base = OTHER; note = 5-cyclopropyl phosphonate-2-O-methyladenosine
  modified_base 1^2: mod_base = OTHER; note = phosphorothioate linkage
  modified_base 2: mod_base = OTHER; note = 2'-fluorouridine
  modified_base 2^3: mod_base = OTHER; note = phosphorothioate linkage
  modified_base 3: mod_base = OTHER; note = 2'-O-methyladenosine
  modified_base 4: mod_base = gm
  modified_base 5: mod_base = gm
  modified_base 6: mod_base = um
  modified_base 7: mod_base = um
  modified_base 8: mod_base = gm
  modified_base 9: mod_base = OTHER; note = 2'-fluoroguanosine
  modified_base 10: mod_base = OTHER; note = 2'-O-methyladenosine
  modified_base 11: mod_base = um
  modified_base 12: mod_base = OTHER; note = 2'-fluoroadenosine
  modified_base 13: mod_base = cm
  modified_base 14: mod_base = OTHER; note = 2'-fluoroadenosine
  modified_base 15: mod_base = um
  modified_base 16: mod_base = OTHER; note = 2'-fluorocytidine
  modified_base 17: mod_base = OTHER; note = 2'-O-methyladenosine
  modified_base 18: mod_base = cm
  modified_base 19: mod_base = um
  modified_base 19^20: mod_base = OTHER; note = phosphorothioate linkage
  modified_base 20: mod_base = gm
  modified_base 20^21: mod_base = OTHER; note = phosphorothioate linkage
  modified_base 21: mod_base = cm
  source 1..21: mol_type = other RNA
ataggttggatacatcactgc

SEQ ID NO: 434 - RNA, 21 nt, synthetic construct
  modified_base 1: mod_base = OTHER; note = 5-cyclopropyl phosphonate-2-O-methyladenosine
  modified_base 1^2: mod_base = OTHER; note = phosphorothioate linkage
  modified_base 2: mod_base = OTHER; note = 2'-fluorouridine
  modified_base 2^3: mod_base = OTHER; note = phosphorothioate linkage
  modified_base 3: mod_base = OTHER; note = 2'-O-methyladenosine
  modified_base 3^4: mod_base = OTHER; note = phosphorothioate linkage
  modified_base 4: mod_base = gm
  modified_base 5: mod_base = gm
  modified_base 6: mod_base = um
  modified_base 7: mod_base = um
  modified_base 8: mod_base = gm
  modified_base 9: mod_base = gm
  modified_base 10: mod_base = OTHER; note = 2'-O-methyladenosine
  modified_base 11: mod_base = um
  modified_base 12: mod_base = OTHER; note = 2'-fluoroadenosine
  modified_base 13: mod_base = cm
  modified_base 14: mod_base = OTHER; note = 2'-fluoroadenosine
  modified_base 15: mod_base = um
  modified_base 16: mod_base = OTHER; note = 2'-fluorocytidine
  modified_base 17: mod_base = OTHER; note = 2'-O-methyladenosine
  modified_base 18: mod_base = cm
  modified_base 19: mod_base = um
  modified_base 20: mod_base = gm
  modified_base 20^21: mod_base = OTHER; note = phosphorothioate linkage
  modified_base 21: mod_base = cm
  source 1..21: mol_type = other RNA
ataggttggatacatcactgc

SEQ ID NO: 435 - RNA, 21 nt, synthetic construct
  modified_base 1: mod_base = OTHER; note = 5-cyclopropyl phosphonate-2-O-methyladenosine
  modified_base 2: mod_base = OTHER; note = 2'-fluorouridine
  modified_base 3: mod_base = OTHER; note = 2'-O-methyladenosine
  modified_base 4: mod_base = gm
  modified_base 5: mod_base = gm
  modified_base 6: mod_base = um
  modified_base 7: mod_base = um
  modified_base 8: mod_base = gm
  modified_base 9: mod_base = gm
  modified_base 10: mod_base = OTHER; note = 2'-O-methyladenosine
  modified_base 11: mod_base = um
  modified_base 12: mod_base = OTHER; note = 2'-fluoroadenosine
  modified_base 13: mod_base = cm
  modified_base 14: mod_base = OTHER; note = 2'-fluoroadenosine
  modified_base 15: mod_base = um
  modified_base 16: mod_base = OTHER; note = 2'-fluorocytidine
  modified_base 17: mod_base = OTHER; note = 2'-O-methyladenosine
  modified_base 18: mod_base = cm
  modified_base 19: mod_base = um
  modified_base 20: mod_base = gm
  modified_base 20^21: mod_base = OTHER; note = phosphorothioate linkage
  modified_base 21: mod_base = cm
  source 1..21: mol_type = other RNA
ataggttggatacatcactgc

SEQ ID NO: 436 - RNA, 21 nt, synthetic construct
  modified_base 1: mod_base = OTHER; note = 5-cyclopropyl phosphonate-2-O-methyladenosine
  modified_base 2: mod_base = OTHER; note = 2'-fluoroguanosine
  modified_base 3: mod_base = OTHER; note = 2'-O-methyladenosine
  modified_base 4: mod_base = cm
  modified_base 5: mod_base = OTHER; note = 2'-O-methyladenosine
  modified_base 6: mod_base = um
  modified_base 7: mod_base = um
  modified_base 8: mod_base = cm
  modified_base 9: mod_base = OTHER; note = 2'-fluoroadenosine
  modified_base 10: mod_base = OTHER; note = 2'-O-methyladenosine
  modified_base 11: mod_base = OTHER; note = 2'-O-methyladenosine
  modified_base 12: mod_base = OTHER; note = 2'-fluoroadenosine
  modified_base 13: mod_base = OTHER; note = 2'-O-methyladenosine
  modified_base 14: mod_base = OTHER; note = 2'-fluorocytidine
  modified_base 15: mod_base = cm
  modified_base 16: mod_base = OTHER; note = 2'-fluoroadenosine
  modified_base 17: mod_base = OTHER; note = 2'-O-methyladenosine
  modified_base 18: mod_base = cm
  modified_base 19: mod_base = um
  modified_base 20: mod_base = gm
  modified_base 20^21: mod_base = OTHER; note = phosphorothioate linkage
  modified_base 21: mod_base = cm
  source 1..21: mol_type = other RNA
agacattcaaaaaccaactgc

SEQ ID NO: 437 - RNA, 21 nt, synthetic construct
  modified_base 1: mod_base = um
  modified_base 1^2: mod_base = OTHER; note = phosphorothioate linkage
  modified_base 2: mod_base = OTHER; note = 2'-fluoroadenosine
  modified_base 2^3: mod_base = OTHER; note = phosphorothioate linkage
  modified_base 3: mod_base = OTHER; note = 2'-O-methyladenosine
  modified_base 3^4: mod_base = OTHER; note = phosphorothioate linkage
  modified_base 4: mod_base = OTHER; note = 2'-fluorocytidine
  modified_base 5: mod_base = OTHER; note = 2'-O-methyladenosine
  modified_base 6: mod_base = OTHER; note = 2'-fluorouridine
  modified_base 7: mod_base = cm
  modified_base 8: mod_base = OTHER; note = 2'-fluorouridine
  modified_base 9: mod_base = gm
  modified_base 10: mod_base = OTHER; note = 2'-fluoroguanosine
  modified_base 11: mod_base = cm
  modified_base 12: mod_base = OTHER; note = 2'-fluoroadenosine
  modified_base 13: mod_base = cm
  modified_base 14: mod_base = OTHER; note = 2'-fluorouridine
  modified_base 15: mod_base = cm
  modified_base 16: mod_base = OTHER; note = 2'-fluorocytidine
  modified_base 17: mod_base = OTHER; note = 2'-O-methyladenosine
  modified_base 18: mod_base = OTHER; note = 2'-fluorocytidine
  modified_base 19: mod_base = OTHER; note = 2'-O-methyladenosine
  modified_base 20: mod_base = OTHER; note = 2'-fluorouridine
  modified_base 20^21: mod_base = OTHER; note = phosphorothioate linkage
  modified_base 21: mod_base = cm
  source 1..21: mol_type = other RNA
taacatctggcactccacatc

SEQ ID NO: 438 - DNA, 21 bp, synthetic construct
  modified_base 1: mod_base = OTHER; note = 5-cyclopropyl phosphonate-2-O-methyluridine
  modified_base 1^2: mod_base = OTHER; note = phosphorothioate linkage
  modified_base 2: mod_base = OTHER; note = 2'-fluoroadenosine
  modified_base 2^3: mod_base = OTHER; note = phosphorothioate linkage
  modified_base 3: mod_base = OTHER; note = 2'-O-methyladenosine
  modified_base 3^4: mod_base = OTHER; note = phosphorothioate linkage
  modified_base 4: mod_base = OTHER; note = 2'-fluorocytidine
  modified_base 5: mod_base = OTHER; note = 2'-O-methyladenosine
  modified_base 6: mod_base = OTHER; note = 2'-fluorouridine
  modified_base 7: mod_base = cm
  modified_base 8: mod_base = OTHER; note = 2'-fluorouridine
  modified_base 9: mod_base = gm
  modified_base 10: mod_base = OTHER; note = 2'-fluoroguanosine
  modified_base 11: mod_base = cm
  modified_base 12: mod_base = OTHER; note = 2'-fluoroadenosine
  modified_base 13: mod_base = cm
  modified_base 14: mod_base = OTHER; note = 2'-fluorouridine
  modified_base 15: mod_base = cm
  modified_base 16: mod_base = OTHER; note = 2'-fluorocytidine
  modified_base 17: mod_base = OTHER; note = 2'-O-methyladenosine
  modified_base 18: mod_base = OTHER; note = 2'-fluorocytidine
  modified_base 19: mod_base = OTHER; note = 2'-O-methyladenosine
  modified_base 20: mod_base = OTHER; note = 2'-fluorouridine
  modified_base 20^21: mod_base = OTHER; note = phosphorothioate linkage
  modified_base 21: mod_base = cm
  source 1..21: mol_type = other DNA
taacatctggcactccacatc

SEQ ID NO: 439 - RNA, 21 nt, synthetic construct
  modified_base 1: mod_base = OTHER; note = 5-cyclopropyl phosphonate-2-O-methyluridine
  modified_base 2: mod_base = OTHER; note = 2'-fluoroadenosine
  modified_base 3: mod_base = OTHER; note = 2'-O-methyladenosine
  modified_base 4: mod_base = cm
  modified_base 5: mod_base = OTHER; note = 2'-O-methyladenosine
  modified_base 6: mod_base = um
  modified_base 7: mod_base = cm
  modified_base 8: mod_base = um
  modified_base 9: mod_base = gm
  modified_base 10: mod_base = gm
  modified_base 11: mod_base = cm
  modified_base 12: mod_base = OTHER; note = 2'-fluoroadenosine
  modified_base 13: mod_base = cm
  modified_base 14: mod_base = OTHER; note = 2'-fluorouridine
  modified_base 15: mod_base = cm
  modified_base 16: mod_base = OTHER; note = 2'-fluorocytidine
  modified_base 17: mod_base = OTHER; note = 2'-O-methyladenosine
  modified_base 18: mod_base = cm
  modified_base 19: mod_base = OTHER; note = 2'-O-methyladenosine
  modified_base 20: mod_base = um
  modified_base 20^21: mod_base = OTHER; note = phosphorothioate linkage
  modified_base 21: mod_base = cm
  source 1..21: mol_type = other RNA
taacatctggcactccacatc

SEQ ID NO: 440 - RNA, 21 nt, synthetic construct
  modified_base 1: mod_base = OTHER; note = 2'-O-methyladenosine
  modified_base 1^2: mod_base = OTHER; note = phosphorothioate linkage
  modified_base 2: mod_base = OTHER; note = 2'-fluoroguanosine
  modified_base 2^3: mod_base = OTHER; note = phosphorothioate linkage
  modified_base 3: mod_base = OTHER; note = 2'-O-methyladenosine
  modified_base 3^4: mod_base = OTHER; note = phosphorothioate linkage
  modified_base 4: mod_base = cm
  modified_base 5: mod_base = OTHER; note = 2'-O-methyladenosine
  modified_base 6: mod_base = um
  modified_base 7: mod_base = um
  modified_base 8: mod_base = cm
  modified_base 9: mod_base = OTHER; note = 2'-O-methyladenosine
  modified_base 10: mod_base = OTHER; note = 2'-O-methyladenosine
  modified_base 11: mod_base = OTHER; note = 2'-O-methyladenosine
  modified_base 12: mod_base = OTHER; note = 2'-fluoroadenosine
  modified_base 13: mod_base = OTHER; note = 2'-O-methyladenosine
  modified_base 14: mod_base = OTHER; note = 2'-fluorocytidine
  modified_base 15: mod_base = cm
  modified_base 16: mod_base = OTHER; note = 2'-fluoroadenosine
  modified_base 17: mod_base = OTHER; note = 2'-O-methyladenosine
  modified_base 18: mod_base = cm
  modified_base 19: mod_base = um
  modified_base 20: mod_base = gm
  modified_base 20^21: mod_base = OTHER; note = phosphorothioate linkage
  modified_base 21: mod_base = cm
  source 1..21: mol_type = other RNA
agacattcaaaaaccaactgc

SEQ ID NO: 441 - RNA, 21 nt, synthetic construct
  modified_base 1: mod_base = OTHER; note = 2'-O-methyladenosine
  modified_base 1^2: mod_base = OTHER; note = phosphorothioate linkage
  modified_base 2: mod_base = OTHER; note = 2'-fluoroguanosine
  modified_base 2^3: mod_base = OTHER; note = phosphorothioate linkage
  modified_base 3: mod_base = OTHER; note = 2'-O-methyladenosine
  modified_base 3^4: mod_base = OTHER; note = phosphorothioate linkage
  modified_base 4: mod_base = cm
  modified_base 5: mod_base = OTHER; note = 2'-O-methyladenosine
  modified_base 6: mod_base = um
  modified_base 7: mod_base = um
  modified_base 8: mod_base = cm
  modified_base 9: mod_base = OTHER; note = 2'-fluoroadenosine
  modified_base 10: mod_base = OTHER; note = 2'-O-methyladenosine
  modified_base 11: mod_base = OTHER; note = 2'-O-methyladenosine
  modified_base 12: mod_base = OTHER; note = 2'-fluoroadenosine
  modified_base 13: mod_base = OTHER; note = 2'-O-methyladenosine
  modified_base 14: mod_base = OTHER; note = 2'-fluorocytidine
  modified_base 15: mod_base = cm
  modified_base 16: mod_base = OTHER; note = 2'-fluoroadenosine
  modified_base 17: mod_base = OTHER; note = 2'-O-methyladenosine
  modified_base 18: mod_base = cm
  modified_base 19: mod_base = um
  modified_base 20: mod_base = gm
  modified_base 20^21: mod_base = OTHER; note = phosphorothioate linkage
  modified_base 21: mod_base = cm
  source 1..21: mol_type = other RNA
agacattcaaaaaccaactgc

SEQ ID NO: 442 - RNA, 21 nt, synthetic construct
  modified_base 1: mod_base = OTHER; note = 2'-O-methyladenosine
  modified_base 1^2: mod_base = OTHER; note = phosphorothioate linkage
  modified_base 2: mod_base = OTHER; note = 2'-fluoroguanosine
  modified_base 2^3: mod_base = OTHER; note = phosphorothioate linkage
  modified_base 3: mod_base = OTHER; note = 2'-O-methyladenosine
  modified_base 3^4: mod_base = OTHER; note = phosphorothioate linkage
  modified_base 4: mod_base = cm
  modified_base 5: mod_base = OTHER; note = 2'-O-methyladenosine
  modified_base 6: mod_base = um
  modified_base 7: mod_base = um
  modified_base 8: mod_base = cm
  modified_base 9: mod_base = OTHER; note = 2'-O-methyladenosine
  modified_base 10: mod_base = OTHER; note = 2'-O-methyladenosine
  modified_base 11: mod_base = OTHER; note = 2'-O-methyladenosine
  modified_base 12: mod_base = OTHER; note = 2'-fluoroadenosine
  modified_base 13: mod_base = OTHER; note = 2'-O-methyladenosine
  modified_base 14: mod_base = OTHER; note = 2'-fluorocytidine
  modified_base 15: mod_base = cm
  modified_base 16: mod_base = OTHER; note = 2'-fluoroadenosine
  modified_base 17: mod_base = OTHER; note = 2'-O-methyladenosine
  modified_base 18: mod_base = cm
  modified_base 19: mod_base = um
  modified_base 20: mod_base = gm
  modified_base 20^21: mod_base = OTHER; note = phosphorothioate linkage
  modified_base 21: mod_base = cm
  source 1..21: mol_type = other RNA
agacattcaaaaaccaactgc

SEQ ID NO: 443 - RNA, 21 nt, synthetic construct
  modified_base 1: mod_base = um
  modified_base 1^2: mod_base = OTHER; note = phosphorothioate linkage
  modified_base 2: mod_base = OTHER; note = 2'-fluorouridine
  modified_base 2^3: mod_base = OTHER; note = phosphorothioate linkage
  modified_base 3: mod_base = gm
  modified_base 3^4: mod_base = OTHER; note = phosphorothioate linkage
  modified_base 4: mod_base = OTHER; note = 2'-O-methyladenosine
  modified_base 5: mod_base = cm
  modified_base 6: mod_base = OTHER; note = 2'-O-methyladenosine
  modified_base 7: mod_base = cm
  modified_base 8: mod_base = OTHER; note = 2'-fluorouridine
  modified_base 9: mod_base = OTHER; note = 2'-O-methyladenosine
  modified_base 10: mod_base = OTHER; note = 2'-fluoroadenosine
  modified_base 11: mod_base = um
  modified_base 12: mod_base = OTHER; note = 2'-fluorocytidine
  modified_base 13: mod_base = gm
  modified_base 14: mod_base = OTHER; note = 2'-fluoroadenosine
  modified_base 15: mod_base = um
  modified_base 16: mod_base = OTHER; note = 2'-fluorocytidine
  modified_base 17: mod_base = cm
  modified_base 18: mod_base = OTHER; note = 2'-O-methyladenosine
  modified_base 19: mod_base = cm
  modified_base 20: mod_base = um
  modified_base 20^21: mod_base = OTHER; note = phosphorothioate linkage
  modified_base 21: mod_base = gm
  source 1..21: mol_type = other RNA
ttgacactaatcgatccactg

SEQ ID NO: 444 - RNA, 21 nt, synthetic construct
  modified_base 1: mod_base = um
  modified_base 1^2: mod_base = OTHER; note = phosphorothioate linkage
  modified_base 2: mod_base = OTHER; note = 2'-fluorouridine
  modified_base 2^3: mod_base = OTHER; note = phosphorothioate linkage
  modified_base 3: mod_base = gm
  modified_base 3^4: mod_base = OTHER; note = phosphorothioate linkage
  modified_base 4: mod_base = OTHER; note = 2'-O-methyladenosine
  modified_base 5: mod_base = cm
  modified_base 6: mod_base = OTHER; note = 2'-O-methyladenosine
  modified_base 7: mod_base = cm
  modified_base 8: mod_base = OTHER; note = 2'-fluorouridine
  modified_base 9: mod_base = OTHER; note = 2'-O-methyladenosine
  modified_base 10: mod_base = OTHER; note = 2'-fluoroadenosine
  modified_base 11: mod_base = um
  modified_base 12: mod_base = OTHER; note = 2'-fluorocytidine
  modified_base 13: mod_base = gm
  modified_base 14: mod_base = OTHER; note = 2'-fluoroadenosine
  modified_base 15: mod_base = um
  modified_base 16: mod_base = OTHER; note = 2'-fluorocytidine
  modified_base 17: mod_base = cm
  modified_base 18: mod_base = OTHER; note = 2'-O-methyladenosine
  modified_base 19: mod_base = cm
  modified_base 20: mod_base = um
  modified_base 20^21: mod_base = OTHER; note = phosphorothioate linkage
  modified_base 21: mod_base = gm
  source 1..21: mol_type = other RNA
ttgacactaatcgatccactg

SEQ ID NO: 445 - RNA, 21 nt, synthetic construct
  modified_base 1: mod_base = OTHER; note = 2'-O-methyladenosine
  modified_base 1^2: mod_base = OTHER; note = phosphorothioate linkage
  modified_base 2: mod_base = OTHER; note = 2'-fluorouridine
  modified_base 2^3: mod_base = OTHER; note = phosphorothioate linkage
  modified_base 3: mod_base = OTHER; note = 2'-O-methyladenosine
  modified_base 3^4: mod_base = OTHER; note = phosphorothioate linkage
  modified_base 4: mod_base = gm
  modified_base 5: mod_base = gm
  modified_base 6: mod_base = um
  modified_base 7: mod_base = um
  modified_base 8: mod_base = gm
  modified_base 9: mod_base = gm
  modified_base 10: mod_base = OTHER; note = 2'-O-methyladenosine
  modified_base 11: mod_base = um
  modified_base 12: mod_base = OTHER; note = 2'-fluoroadenosine
  modified_base 13: mod_base = cm
  modified_base 14: mod_base = OTHER; note = 2'-fluoroadenosine
  modified_base 15: mod_base = um
  modified_base 16: mod_base = OTHER; note = 2'-fluorocytidine
  modified_base 17: mod_base = OTHER; note = 2'-O-methyladenosine
  modified_base 18: mod_base = cm
  modified_base 19: mod_base = um
  modified_base 20: mod_base = gm
  modified_base 20^21: mod_base = OTHER; note = phosphorothioate linkage
  modified_base 21: mod_base = cm
  source 1..21: mol_type = other RNA
ataggttggatacatcactgc

SEQ ID NO: 446 - RNA, 21 nt, synthetic construct
  modified_base 1: mod_base = OTHER; note = 5-cyclopropyl phosphonate-2-O-methyladenosine
  modified_base 1^2: mod_base = OTHER; note = phosphorothioate linkage
  modified_base 2: mod_base = OTHER; note = 2'-fluorouridine
  modified_base 2^3: mod_base = OTHER; note = phosphorothioate linkage
  modified_base 3: mod_base = OTHER; note = 2'-O-methyladenosine
  modified_base 4: mod_base = OTHER; note = 2'-fluoroguanosine
  modified_base 5: mod_base = gm
  modified_base 6: mod_base = um
  modified_base 7: mod_base = um
  modified_base 8: mod_base = gm
  modified_base 9: mod_base = gm
  modified_base 10: mod_base = OTHER; note = 2'-O-methyladenosine
  modified_base 11: mod_base = um
  modified_base 12: mod_base = OTHER; note = 2'-fluoroadenosine
  modified_base 13: mod_base = cm
  modified_base 14: mod_base = OTHER; note = 2'-fluoroadenosine
  modified_base 15: mod_base = um
  modified_base 16: mod_base = OTHER; note = 2'-fluorocytidine
  modified_base 17: mod_base = OTHER; note = 2'-O-methyladenosine
  modified_base 18: mod_base = cm
  modified_base 19: mod_base = um
  modified_base 19^20: mod_base = OTHER; note = phosphorothioate linkage
  modified_base 20: mod_base = gm
  modified_base 20^21: mod_base = OTHER; note = phosphorothioate linkage
  modified_base 21: mod_base = cm
  source 1..21: mol_type = other RNA
ataggttggatacatcactgc

SEQ ID NO: 447 - RNA, 21 nt, synthetic construct
  modified_base 1: mod_base = OTHER; note = 5-cyclopropyl phosphonate-2-O-methyladenosine
  modified_base 1^2: mod_base = OTHER; note = phosphorothioate linkage
  modified_base 2: mod_base = OTHER; note = 2'-fluorouridine
  modified_base 2^3: mod_base = OTHER; note = phosphorothioate linkage
  modified_base 3: mod_base = OTHER; note = 2'-O-methyladenosine
  modified_base 4: mod_base = gm
  modified_base 5: mod_base = OTHER; note = 2'-fluoroguanosine
  modified_base 6: mod_base = um
  modified_base 7: mod_base = um
  modified_base 8: mod_base = gm
  modified_base 9: mod_base = gm
  modified_base 10: mod_base = OTHER; note = 2'-O-methyladenosine
  modified_base 11: mod_base = um
  modified_base 12: mod_base = OTHER; note = 2'-fluoroadenosine
  modified_base 13: mod_base = cm
  modified_base 14: mod_base = OTHER; note = 2'-fluoroadenosine
  modified_base 15: mod_base = um
  modified_base 16: mod_base = OTHER; note = 2'-fluorocytidine
  modified_base 17: mod_base = OTHER; note = 2'-O-methyladenosine
  modified_base 18: mod_base = cm
  modified_base 19: mod_base = um
  modified_base 19^20: mod_base = OTHER; note = phosphorothioate linkage
  modified_base 20: mod_base = gm
  modified_base 20^21: mod_base = OTHER; note = phosphorothioate linkage
  modified_base 21: mod_base = cm
  source 1..21: mol_type = other RNA
ataggttggatacatcactgc

SEQ ID NO: 448 - RNA, 21 nt, synthetic construct
  modified_base 1: mod_base = OTHER; note = 5-cyclopropyl phosphonate-2-O-methyluridine
  modified_base 2: mod_base = OTHER; note = 2'-fluoroguanosine
  modified_base 3: mod_base = OTHER; note = 2'-O-methyladenosine
  modified_base 4: mod_base = cm
  modified_base 5: mod_base = OTHER; note = 2'-O-methyladenosine
  modified_base 6: mod_base = um
  modified_base 7: mod_base = um
  modified_base 8: mod_base = cm
  modified_base 9: mod_base = OTHER; note = 2'-fluoroadenosine
  modified_base 10: mod_base = OTHER; note = 2'-O-methyladenosine
  modified_base 11: mod_base = OTHER; note = 2'-O-methyladenosine
  modified_base 12: mod_base = OTHER; note = 2'-fluoroadenosine
  modified_base 13: mod_base = OTHER; note = 2'-O-methyladenosine
  modified_base 14: mod_base = OTHER; note = 2'-fluorocytidine
  modified_base 15: mod_base = cm
  modified_base 16: mod_base = OTHER; note = 2'-fluoroadenosine
  modified_base 17: mod_base = OTHER; note = 2'-O-methyladenosine
  modified_base 18: mod_base = cm
  modified_base 19: mod_base = um
  modified_base 20: mod_base = gm
  modified_base 20^21: mod_base = OTHER; note = phosphorothioate linkage
  modified_base 21: mod_base = cm
  source 1..21: mol_type = other RNA
tgacattcaaaaaccaactgc

SEQ ID NO: 449 - RNA, 21 nt, synthetic construct
  modified_base 1: mod_base = OTHER; note = 5-cyclopropyl phosphonate-2-O-methyluridine
  modified_base 2: mod_base = OTHER; note = 2'-fluoroguanosine
  modified_base 3: mod_base = OTHER; note = 2'-O-methyladenosine
  modified_base 4: mod_base = cm
  modified_base 5: mod_base = OTHER; note = 2'-O-methyladenosine
  modified_base 6: mod_base = um
  modified_base 7: mod_base = um
  modified_base 8: mod_base = cm
  modified_base 9: mod_base = OTHER; note = 2'-fluoroadenosine
  modified_base 10: mod_base = OTHER; note = 2'-O-methyladenosine
  modified_base 11: mod_base = OTHER; note = 2'-O-methyladenosine
  modified_base 12: mod_base = OTHER; note = 2'-fluoroadenosine
  modified_base 13: mod_base = OTHER; note = 2'-O-methyladenosine
  modified_base 14: mod_base = OTHER; note = 2'-fluorocytidine
  modified_base 15: mod_base = cm
  modified_base 16: mod_base = OTHER; note = 2'-fluoroadenosine
  modified_base 17: mod_base = OTHER; note = 2'-O-methyladenosine
  modified_base 18: mod_base = cm
  modified_base 19: mod_base = um
  modified_base 20: mod_base = gm
  modified_base 20^21: mod_base = OTHER; note = phosphorothioate linkage
  modified_base 21: mod_base = cm
  source 1..21: mol_type = other RNA
tgacattcaaaaaccaactgc

SEQ ID NO: 450 - RNA, 21 nt, synthetic construct
  modified_base 1: mod_base = OTHER; note = 5-cyclopropyl phosphonate-2-O-methyluridine
  modified_base 2: mod_base = OTHER; note = 2'-fluoroguanosine
  modified_base 3: mod_base = OTHER; note = 2'-O-methyladenosine
  modified_base 4: mod_base = cm
  modified_base 5: mod_base = OTHER; note = 2'-O-methyladenosine
  modified_base 6: mod_base = um
  modified_base 7: mod_base = um
  modified_base 8: mod_base = cm
  modified_base 9: mod_base = OTHER; note = 2'-fluoroadenosine
  modified_base 10: mod_base = OTHER; note = 2'-O-methyladenosine
  modified_base 11: mod_base = OTHER; note = 2'-O-methyladenosine
  modified_base 12: mod_base = OTHER; note = 2'-fluoroadenosine
  modified_base 13: mod_base = OTHER; note = 2'-O-methyladenosine
  modified_base 14: mod_base = OTHER; note = 2'-fluorocytidine
  modified_base 15: mod_base = cm
  modified_base 16: mod_base = OTHER; note = 2'-fluoroadenosine
  modified_base 17: mod_base = OTHER; note = 2'-O-methyladenosine
  modified_base 18: mod_base = cm
  modified_base 19: mod_base = um
  modified_base 20: mod_base = gm
  modified_base 20^21: mod_base = OTHER; note = phosphorothioate linkage
  modified_base 21: mod_base = cm
  source 1..21: mol_type = other RNA
tgacattcaaaaaccaactgc

SEQ ID NO: 451 - RNA, 21 nt, synthetic construct
  modified_base 1: mod_base = OTHER; note = 5-cyclopropyl phosphonate-2-O-methyluridine
  modified_base 2: mod_base = OTHER; note = 2'-fluoroguanosine
  modified_base 3: mod_base = OTHER; note = 2'-O-methyladenosine
  modified_base 4: mod_base = cm
  modified_base 5: mod_base = OTHER; note = 2'-O-methyladenosine
  modified_base 6: mod_base = um
  modified_base 7: mod_base = um
  modified_base 8: mod_base = cm
  modified_base 9: mod_base = OTHER; note = 2'-fluoroadenosine
  modified_base 10: mod_base = OTHER; note = 2'-O-methyladenosine
  modified_base 11: mod_base = OTHER; note = 2'-O-methyladenosine
  modified_base 12: mod_base = OTHER; note = 2'-fluoroadenosine
  modified_base 13: mod_base = OTHER; note = 2'-O-methyladenosine
  modified_base 14: mod_base = OTHER; note = 2'-fluorocytidine
  modified_base 15: mod_base = cm
  modified_base 16: mod_base = OTHER; note = 2'-fluoroadenosine
  modified_base 17: mod_base = OTHER; note = 2'-O-methyladenosine
  modified_base 18: mod_base = cm
  modified_base 19: mod_base = um
  modified_base 20: mod_base = gm
  modified_base 20^21: mod_base = OTHER; note = phosphorothioate linkage
  modified_base 21: mod_base = cm
  source 1..21: mol_type = other RNA
tgacattcaaaaaccaactgc

SEQ ID NO: 452 - RNA, 21 nt, synthetic construct
  modified_base 1: mod_base = OTHER; note = 5-cyclopropyl phosphonate-2-O-methyluridine
  modified_base 2: mod_base = OTHER; note = 2'-fluorouridine
  modified_base 3: mod_base = gm
  modified_base 4: mod_base = OTHER; note = 2'-O-methyladenosine
  modified_base 5: mod_base = cm
  modified_base 6: mod_base = OTHER; note = 2'-O-methyladenosine
  modified_base 7: mod_base = cm
  modified_base 8: mod_base = OTHER; note = 2'-fluorouridine
  modified_base 9: mod_base = OTHER; note = 2'-O-methyladenosine
  modified_base 10: mod_base = OTHER; note = 2'-fluoroadenosine
  modified_base 11: mod_base = um
  modified_base 12: mod_base = OTHER; note = 2'-fluorocytidine
  modified_base 13: mod_base = gm
  modified_base 14: mod_base = OTHER; note = 2'-fluoroadenosine
  modified_base 15: mod_base = um
  modified_base 16: mod_base = OTHER; note = 2'-fluorocytidine
  modified_base 17: mod_base = cm
  modified_base 18: mod_base = OTHER; note = 2'-O-methyladenosine
  modified_base 19: mod_base = cm
  modified_base 20: mod_base = um
  modified_base 20^21: mod_base = OTHER; note = phosphorothioate linkage
  modified_base 21: mod_base = gm
  source 1..21: mol_type = other RNA
ttgacactaatcgatccactg

SEQ ID NO: 453 - RNA, 21 nt, synthetic construct
  modified_base 1: mod_base = OTHER; note = 5-cyclopropyl phosphonate-2-O-methyluridine
  modified_base 1^2: mod_base = OTHER; note = phosphorothioate linkage
  modified_base 2: mod_base = OTHER; note = 2'-fluoroguanosine
  modified_base 2^3: mod_base = OTHER; note = phosphorothioate linkage
  modified_base 3: mod_base = OTHER; note = 2'-O-methyladenosine
  modified_base 3^4: mod_base = OTHER; note = phosphorothioate linkage
  modified_base 4: mod_base = cm
  modified_base 5: mod_base = OTHER; note = 2'-O-methyladenosine
  modified_base 6: mod_base = um
  modified_base 7: mod_base = um
  modified_base 8: mod_base = cm
  modified_base 9: mod_base = OTHER; note = 2'-fluoroadenosine
  modified_base 10: mod_base = OTHER; note = 2'-O-methyladenosine
  modified_base 11: mod_base = OTHER; note = 2'-O-methyladenosine
  modified_base 12: mod_base = OTHER; note = 2'-fluoroadenosine
  modified_base 13: mod_base = OTHER; note = 2'-O-methyladenosine
  modified_base 14: mod_base = OTHER; note = 2'-fluorocytidine
  modified_base 15: mod_base = cm
  modified_base 16: mod_base = OTHER; note = 2'-fluoroadenosine
  modified_base 17: mod_base = OTHER; note = 2'-O-methyladenosine
  modified_base 18: mod_base = cm
  modified_base 19: mod_base = um
  modified_base 20: mod_base = gm
  modified_base 20^21: mod_base = OTHER; note = phosphorothioate linkage
  modified_base 21: mod_base = cm
  source 1..21: mol_type = other RNA
tgacattcaaaaaccaactgc

SEQ ID NO: 454 - RNA, 21 nt, synthetic construct
  modified_base 1: mod_base = OTHER; note = 5-cyclopropyl phosphonate-2-O-methyladenosine
  modified_base 2: mod_base = OTHER; note = 2'-fluoroguanosine
  modified_base 3: mod_base = OTHER; note = 2'-O-methyladenosine
  modified_base 4: mod_base = cm
  modified_base 5: mod_base = OTHER; note = 2'-O-methyladenosine
  modified_base 6: mod_base = um
  modified_base 7: mod_base = um
  modified_base 8: mod_base = cm
  modified_base 9: mod_base = OTHER; note = 2'-fluoroadenosine
  modified_base 10: mod_base = OTHER; note = 2'-O-methyladenosine
  modified_base 11: mod_base = OTHER; note = 2'-O-methyladenosine
  modified_base 12: mod_base = OTHER; note = 2'-fluoroadenosine
  modified_base 13: mod_base = OTHER; note = 2'-O-methyladenosine
  modified_base 14: mod_base = OTHER; note = 2'-fluorocytidine
  modified_base 15: mod_base = cm
  modified_base 16: mod_base = OTHER; note = 2'-fluoroadenosine
  modified_base 17: mod_base = OTHER; note = 2'-O-methyladenosine
  modified_base 18: mod_base = cm
  modified_base 19: mod_base = um
  modified_base 20: mod_base = gm
  modified_base 20^21: mod_base = OTHER; note = phosphorothioate linkage
  modified_base 21: mod_base = cm
  source 1..21: mol_type = other RNA
agacattcaaaaaccaactgc

SEQ ID NO: 455 - RNA, 21 nt, synthetic construct
  modified_base 1: mod_base = OTHER; note = 5-cyclopropyl phosphonate-2-O-methyladenosine
  modified_base 1^2: mod_base = OTHER; note = phosphorothioate linkage
  modified_base 2: mod_base = OTHER; note = 2'-fluoroguanosine
  modified_base 2^3: mod_base = OTHER; note = phosphorothioate linkage
  modified_base 3: mod_base = OTHER; note = 2'-O-methyladenosine
  modified_base 3^4: mod_base = OTHER; note = phosphorothioate linkage
  modified_base 4: mod_base = cm
  modified_base 5: mod_base = OTHER; note = 2'-O-methyladenosine
  modified_base 6: mod_base = um
  modified_base 7: mod_base = um
  modified_base 8: mod_base = cm
  modified_base 9: mod_base = OTHER; note = 2'-fluoroadenosine
  modified_base 10: mod_base = OTHER; note = 2'-O-methyladenosine
  modified_base 11: mod_base = OTHER; note = 2'-O-methyladenosine
  modified_base 12: mod_base = OTHER; note = 2'-fluoroadenosine
  modified_base 13: mod_base = OTHER; note = 2'-O-methyladenosine
  modified_base 14: mod_base = OTHER; note = 2'-fluorocytidine
  modified_base 15: mod_base = cm
  modified_base 16: mod_base = OTHER; note = 2'-fluoroadenosine
  modified_base 17: mod_base = OTHER; note = 2'-O-methyladenosine
  modified_base 18: mod_base = cm
  modified_base 19: mod_base = um
  modified_base 20: mod_base = gm
  modified_base 20^21: mod_base = OTHER; note = phosphorothioate linkage
  modified_base 21: mod_base = cm
  source 1..21: mol_type = other RNA
agacattcaaaaaccaactgc

SEQ ID NO: 456 - RNA, 21 nt, synthetic construct
  modified_base 1: mod_base = OTHER; note = 5-cyclopropyl phosphonate-2-O-methyladenosine
  modified_base 1^2: mod_base = OTHER; note = phosphorothioate linkage
  modified_base 2: mod_base = OTHER; note = 2'-fluorouridine
  modified_base 2^3: mod_base = OTHER; note = phosphorothioate linkage
  modified_base 3: mod_base = OTHER; note = 2'-O-methyladenosine
  modified_base 3^4: mod_base = OTHER; note = phosphorothioate linkage
  modified_base 4: mod_base = gm
  modified_base 5: mod_base = gm
  modified_base 6: mod_base = um
  modified_base 7: mod_base = um
  modified_base 8: mod_base = gm
  modified_base 9: mod_base = gm
  modified_base 10: mod_base = OTHER; note = 2'-O-methyladenosine
  modified_base 11: mod_base = um
  modified_base 12: mod_base = OTHER; note = 2'-fluoroadenosine
  modified_base 13: mod_base = cm
  modified_base 14: mod_base = OTHER; note = 2'-fluoroadenosine
  modified_base 15: mod_base = um
  modified_base 16: mod_base = OTHER; note = 2'-fluorocytidine
  modified_base 17: mod_base = OTHER; note = 2'-O-methyladenosine
  modified_base 18: mod_base = cm
  modified_base 19: mod_base = um
  modified_base 20: mod_base = gm
  modified_base 20^21: mod_base = OTHER; note = phosphorothioate linkage
  modified_base 21: mod_base = cm
  source 1..21: mol_type = other RNA
ataggttggatacatcactgc

SEQ ID NO: 457 - RNA, 21 nt, synthetic construct
  modified_base 1: mod_base = OTHER; note = 5-cyclopropyl phosphonate-2-O-methyladenosine
  modified_base 2: mod_base = OTHER; note = 2'-fluorouridine
  modified_base 3: mod_base = OTHER; note = 2'-O-methyladenosine
  modified_base 4: mod_base = gm
  modified_base 5: mod_base = gm
  modified_base 6: mod_base = um
  modified_base 7: mod_base = um
  modified_base 8: mod_base = gm
  modified_base 9: mod_base = gm
  modified_base 10: mod_base = OTHER; note = 2'-O-methyladenosine
  modified_base 11: mod_base = um
  modified_base 12: mod_base = OTHER; note = 2'-fluoroadenosine
  modified_base 13: mod_base = cm
  modified_base 14: mod_base = OTHER; note = 2'-fluoroadenosine
  modified_base 15: mod_base = um
  modified_base 16: mod_base = OTHER; note = 2'-fluorocytidine
  modified_base 17: mod_base = OTHER; note = 2'-O-methyladenosine
  modified_base 18: mod_base = cm
  modified_base 19: mod_base = um
  modified_base 20: mod_base = gm
  modified_base 20^21: mod_base = OTHER; note = phosphorothioate linkage
  modified_base 21: mod_base = cm
  source 1..21: mol_type = other RNA
ataggttggatacatcactgc

SEQ ID NO: 458 - RNA, 21 nt, synthetic construct
  modified_base 1: mod_base = OTHER; note = 2'-O-methyladenosine
  modified_base 1^2: mod_base = OTHER; note = phosphorothioate linkage
  modified_base 2: mod_base = gm
  modified_base 3: mod_base = OTHER; note = 2'-O-methyladenosine
  modified_base 4: mod_base = um
  modified_base 5: mod_base = gm
  modified_base 6: mod_base = um
  modified_base 7: mod_base = gm
  modified_base 8: mod_base = gm
  modified_base 9: mod_base = OTHER; note = 2'-fluoroadenosine
  modified_base 10: mod_base = OTHER; note = 2'-fluoroguanosine
  modified_base 11: mod_base = OTHER; note = 2'-fluorouridine
  modified_base 12: mod_base = gm
  modified_base 13: mod_base = cm
  modified_base 14: mod_base = cm
  modified_base 15: mod_base = OTHER; note = 2'-O-methyladenosine
  modified_base 16: mod_base = gm
  modified_base 17: mod_base = OTHER; note = 2'-O-methyladenosine
  modified_base 18: mod_base = um
  modified_base 19: mod_base = gm
  modified_base 20: mod_base = um
  modified_base 21: mod_base = um
  source 1..21: mol_type = other RNA
agatgtggagtgccagatgtt

SEQ ID NO: 459 - RNA, 21 nt, synthetic construct
  modified_base 1: mod_base = cm
  modified_base 1^2: mod_base = OTHER; note = phosphorothioate linkage
  modified_base 2: mod_base = gm
  modified_base 3: mod_base = OTHER; note = 2'-O-methyladenosine
  modified_base 4: mod_base = um
  modified_base 5: mod_base = gm
  modified_base 6: mod_base = um
  modified_base 7: mod_base = gm
  modified_base 8: mod_base = gm
  modified_base 9: mod_base = OTHER; note = 2'-fluoroadenosine
  modified_base 10: mod_base = OTHER; note = 2'-fluoroguanosine
  modified_base 11: mod_base = OTHER; note = 2'-fluorouridine
  modified_base 12: mod_base = gm
  modified_base 13: mod_base = cm
  modified_base 14: mod_base = cm
  modified_base 15: mod_base = OTHER; note = 2'-O-methyladenosine
  modified_base 16: mod_base = gm
  modified_base 17: mod_base = OTHER; note = 2'-O-methyladenosine
  modified_base 18: mod_base = um
  modified_base 19: mod_base = gm
  modified_base 20: mod_base = um
  modified_base 21: mod_base = um
  source 1..21: mol_type = other RNA
cgatgtggagtgccagatgtt

SEQ ID NO: 460 - RNA, 21 nt, synthetic construct
  modified_base 1: mod_base = OTHER; note = 2'-O-methyladenosine
  modified_base 1^2: mod_base = OTHER; note = phosphorothioate linkage
  modified_base 2: mod_base = um
  modified_base 3: mod_base = gm
  modified_base 4: mod_base = um
  modified_base 5: mod_base = gm
  modified_base 6: mod_base = gm
  modified_base 7: mod_base = OTHER; note = 2'-O-methyladenosine
  modified_base 8: mod_base = gm
  modified_base 9: mod_base = OTHER; note = 2'-fluorouridine
  modified_base 10: mod_base = OTHER; note = 2'-fluoroguanosine
  modified_base 11: mod_base = OTHER; note = 2'-fluorocytidine
  modified_base 12: mod_base = cm
  modified_base 13: mod_base = OTHER; note = 2'-O-methyladenosine
  modified_base 14: mod_base = gm
  modified_base 15: mod_base = OTHER; note = 2'-O-methyladenosine
  modified_base 16: mod_base = um
  modified_base 17: mod_base = gm
  modified_base 18: mod_base = um
  modified_base 19: mod_base = um
  modified_base 20: mod_base = gm
  modified_base 21: mod_base = OTHER; note = 2'-O-methyladenosine
  source 1..21: mol_type = other RNA
atgtggagtgccagatgttga

SEQ ID NO: 461 - RNA, 21 nt, synthetic construct
  modified_base 1: mod_base = cm
  modified_base 1^2: mod_base = OTHER; note = phosphorothioate linkage
  modified_base 2: mod_base = um
  modified_base 3: mod_base = gm
  modified_base 4: mod_base = um
  modified_base 5: mod_base = gm
  modified_base 6: mod_base = gm
  modified_base 7: mod_base = OTHER; note = 2'-O-methyladenosine
  modified_base 8: mod_base = gm
  modified_base 9: mod_base = OTHER; note = 2'-fluorouridine
  modified_base 10: mod_base = OTHER; note = 2'-fluoroguanosine
  modified_base 11: mod_base = OTHER; note = 2'-fluorocytidine
  modified_base 12: mod_base = cm
  modified_base 13: mod_base = OTHER; note = 2'-O-methyladenosine
  modified_base 14: mod_base = gm
  modified_base 15: mod_base = OTHER; note = 2'-O-methyladenosine
  modified_base 16: mod_base = um
  modified_base 17: mod_base = gm
  modified_base 18: mod_base = um
  modified_base 19: mod_base = um
  modified_base 20: mod_base = gm
  modified_base 21: mod_base = OTHER; note = 2'-O-methyladenosine
  source 1..21: mol_type = other RNA
ctgtggagtgccagatgttga

SEQ ID NO: 462 - RNA, 21 nt, synthetic construct
  modified_base 1: mod_base = um
  modified_base 1^2: mod_base = OTHER; note = phosphorothioate linkage
  modified_base 2: mod_base = gm
  modified_base 3: mod_base = um
  modified_base 4: mod_base = gm
  modified_base 5: mod_base = gm
  modified_base 6: mod_base = OTHER; note = 2'-O-methyladenosine
  modified_base 7: mod_base = gm
  modified_base 8: mod_base = um
  modified_base 9: mod_base = OTHER; note = 2'-fluoroguanosine
  modified_base 10: mod_base = OTHER; note = 2'-fluorocytidine
  modified_base 11: mod_base = OTHER; note = 2'-fluorocytidine
  modified_base 12: mod_base = OTHER; note = 2'-O-methyladenosine
  modified_base 13: mod_base = gm
  modified_base 14: mod_base = OTHER; note = 2'-O-methyladenosine
  modified_base 15: mod_base = um
  modified_base 16: mod_base = gm
  modified_base 17: mod_base = um
  modified_base 18: mod_base = um
  modified_base 19: mod_base = gm
  modified_base 20: mod_base = cm
  modified_base 21: mod_base = OTHER; note = 2'-O-methyladenosine
  source 1..21: mol_type = other RNA
tgtggagtgccagatgttgca

SEQ ID NO: 463 - RNA, 21 nt, synthetic construct
  modified_base 1: mod_base = cm
  modified_base 1^2: mod_base = OTHER; note = phosphorothioate linkage
  modified_base 2: mod_base = gm
  modified_base 3: mod_base = um
  modified_base 4: mod_base = gm
  modified_base 5: mod_base = gm
  modified_base 6: mod_base = OTHER; note = 2'-O-methyladenosine
  modified_base 7: mod_base = gm
  modified_base 8: mod_base = um
  modified_base 9: mod_base = OTHER; note = 2'-fluoroguanosine
  modified_base 10: mod_base = OTHER; note = 2'-fluorocytidine
  modified_base 11: mod_base = OTHER; note = 2'-fluorocytidine
  modified_base 12: mod_base = OTHER; note = 2'-O-methyladenosine
  modified_base 13: mod_base = gm
  modified_base 14: mod_base = OTHER; note = 2'-O-methyladenosine
  modified_base 15: mod_base = um
  modified_base 16: mod_base = gm
  modified_base 17: mod_base = um
  modified_base 18: mod_base = um
  modified_base 19: mod_base = gm
  modified_base 20: mod_base = cm
  modified_base 21: mod_base = OTHER; note = 2'-O-methyladenosine
  source 1..21: mol_type = other RNA
cgtggagtgccagatgttgca

SEQ ID NO: 464 - RNA, 21 nt, synthetic construct
  modified_base 1: mod_base = um
  modified_base 1^2: mod_base = OTHER; note = phosphorothioate linkage
  modified_base 2: mod_base = gm
  modified_base 3: mod_base = gm
  modified_base 4: mod_base = OTHER; note = 2'-O-methyladenosine
  modified_base 5: mod_base = gm
  modified_base 6: mod_base = um
  modified_base 7: mod_base = gm
  modified_base 8: mod_base = cm
  modified_base 9: mod_base = OTHER; note = 2'-fluorocytidine
  modified_base 10: mod_base = OTHER; note = 2'-fluoroadenosine
  modified_base 11: mod_base = OTHER; note = 2'-fluoroguanosine
  modified_base 12: mod_base = OTHER; note = 2'-O-methyladenosine
  modified_base 13: mod_base = um
  modified_base 14: mod_base = gm
  modified_base 15: mod_base = um
  modified_base 16: mod_base = um
  modified_base 17: mod_base = gm
  modified_base 18: mod_base = cm
  modified_base 19: mod_base = OTHER; note = 2'-O-methyladenosine
  modified_base 20: mod_base = gm
  modified_base 21: mod_base = OTHER; note = 2'-O-methyladenosine
  source 1..21: mol_type = other RNA
tggagtgccagatgttgcaga

SEQ ID NO: 465 - RNA, 21 nt, synthetic construct
  modified_base 1: mod_base = cm
  modified_base 1^2: mod_base = OTHER; note = phosphorothioate linkage
  modified_base 2: mod_base = gm
  modified_base 3: mod_base = gm
  modified_base 4: mod_base = OTHER; note = 2'-O-methyladenosine
  modified_base 5: mod_base = gm
  modified_base 6: mod_base = um
  modified_base 7: mod_base = gm
  modified_base 8: mod_base = cm
  modified_base 9: mod_base = OTHER; note = 2'-fluorocytidine
  modified_base 10: mod_base = OTHER; note = 2'-fluoroadenosine
  modified_base 11: mod_base = OTHER; note = 2'-fluoroguanosine
  modified_base 12: mod_base = OTHER; note = 2'-O-methyladenosine
  modified_base 13: mod_base = um
  modified_base 14: mod_base = gm
  modified_base 15: mod_base = um
  modified_base 16: mod_base = um
  modified_base 17: mod_base = gm
  modified_base 18: mod_base = cm
  modified_base 19: mod_base = OTHER; note = 2'-O-methyladenosine
  modified_base 20: mod_base = gm
  modified_base 21: mod_base = OTHER; note = 2'-O-methyladenosine
  source 1..21: mol_type = other RNA
cggagtgccagatgttgcaga

SEQ ID NO: 466 - RNA, 21 nt, synthetic construct
  modified_base 1: mod_base = gm
  modified_base 1^2: mod_base = OTHER; note = phosphorothioate linkage
  modified_base 2: mod_base = gm
  modified_base 3: mod_base = OTHER; note = 2'-O-methyladenosine
  modified_base 4: mod_base = gm
  modified_base 5: mod_base = um
  modified_base 6: mod_base = gm
  modified_base 7: mod_base = cm
  modified_base 8: mod_base = cm
  modified_base 9: mod_base = OTHER; note = 2'-fluoroadenosine
  modified_base 10: mod_base = OTHER; note = 2'-fluoroguanosine
  modified_base 11: mod_base = OTHER; note = 2'-fluoroadenosine
  modified_base 12: mod_base = um
  modified_base 13: mod_base = gm
  modified_base 14: mod_base = um
  modified_base 15: mod_base = um
  modified_base 16: mod_base = gm
  modified_base 17: mod_base = cm
  modified_base 18: mod_base = OTHER; note = 2'-O-methyladenosine
  modified_base 19: mod_base = gm
  modified_base 20: mod_base = OTHER; note = 2'-O-methyladenosine
  modified_base 21: mod_base = OTHER; note = 2'-O-methyladenosine
  source 1..21: mol_type = other RNA
ggagtgccagatgttgcagaa

SEQ ID NO: 467 - RNA, 21 nt, synthetic construct
  modified_base 1: mod_base = gm
  modified_base 1^2: mod_base = OTHER; note = phosphorothioate linkage
  modified_base 2: mod_base = OTHER; note = 2'-O-methyladenosine
  modified_base 3: mod_base = gm
  modified_base 4: mod_base = um
  modified_base 5: mod_base = gm
  modified_base 6: mod_base = cm
  modified_base 7: mod_base = cm
  modified_base 8: mod_base = OTHER; note = 2'-O-methyladenosine
  modified_base 9: mod_base = OTHER; note = 2'-fluoroguanosine
  modified_base 10: mod_base = OTHER; note = 2'-fluoroadenosine
  modified_base 11: mod_base = OTHER; note = 2'-fluorouridine
  modified_base 12: mod_base = gm
  modified_base 13: mod_base = um
  modified_base 14: mod_base = um
  modified_base 15: mod_base = gm
  modified_base 16: mod_base = cm
  modified_base 17: mod_base = OTHER; note = 2'-O-methyladenosine
  modified_base 18: mod_base = gm
  modified_base 19: mod_base = OTHER; note = 2'-O-methyladenosine
  modified_base 20: mod_base = OTHER; note = 2'-O-methyladenosine
  modified_base 21: mod_base = um
  source 1..21: mol_type = other RNA
gagtgccagatgttgcagaat

SEQ ID NO: 468 - RNA, 21 nt, synthetic construct
  modified_base 1: mod_base = OTHER; note = 2'-O-methyladenosine
  modified_base 1^2: mod_base = OTHER; note = phosphorothioate linkage
  modified_base 2: mod_base = gm
  modified_base 3: mod_base = um
  modified_base 4: mod_base = gm
  modified_base 5: mod_base = cm
  modified_base 6: mod_base = cm
  modified_base 7: mod_base = OTHER; note = 2'-O-methyladenosine
  modified_base 8: mod_base = gm
  modified_base 9: mod_base = OTHER; note = 2'-fluoroadenosine
  modified_base 10: mod_base = OTHER; note = 2'-fluorouridine
  modified_base 11: mod_base = OTHER; note = 2'-fluoroguanosine
  modified_base 12: mod_base = um
  modified_base 13: mod_base = um
  modified_base 14: mod_base = gm
  modified_base 15: mod_base = cm
  modified_base 16: mod_base = OTHER; note = 2'-O-methyladenosine
  modified_base 17: mod_base = gm
  modified_base 18: mod_base = OTHER; note = 2'-O-methyladenosine
  modified_base 19: mod_base = OTHER; note = 2'-O-methyladenosine
  modified_base 20: mod_base = um
  modified_base 21: mod_base = OTHER; note = 2'-O-methyladenosine
  source 1..21: mol_type = other RNA
agtgccagatgttgcagaata

SEQ ID NO: 469 - RNA, 21 nt, synthetic construct
  modified_base 1: mod_base = cm
  modified_base 1^2: mod_base = OTHER; note = phosphorothioate linkage
  modified_base 2: mod_base = gm
  modified_base 3: mod_base = um
  modified_base 4: mod_base = gm
  modified_base 5: mod_base = cm
  modified_base 6: mod_base = cm
  modified_base 7: mod_base = OTHER; note = 2'-O-methyladenosine
  modified_base 8: mod_base = gm
  modified_base 9: mod_base = OTHER; note = 2'-fluoroadenosine
  modified_base 10: mod_base = OTHER; note = 2'-fluorouridine
  modified_base 11: mod_base = OTHER; note = 2'-fluoroguanosine
  modified_base 12: mod_base = um
  modified_base 13: mod_base = um
  modified_base 14: mod_base = gm
  modified_base 15: mod_base = cm
  modified_base 16: mod_base = OTHER; note = 2'-O-methyladenosine
  modified_base 17: mod_base = gm
  modified_base 18: mod_base = OTHER; note = 2'-O-methyladenosine
  modified_base 19: mod_base = OTHER; note = 2'-O-methyladenosine
  modified_base 20: mod_base = um
  modified_base 21: mod_base = OTHER; note = 2'-O-methyladenosine
  source 1..21: mol_type = other RNA
cgtgccagatgttgcagaata

SEQ ID NO: 470 - RNA, 21 nt, synthetic construct
  modified_base 1: mod_base = cm
  modified_base 1^2: mod_base = OTHER; note = phosphorothioate linkage
  modified_base 2: mod_base = cm
  modified_base 3: mod_base = cm
  modified_base 4: mod_base = OTHER; note = 2'-O-methyladenosine
  modified_base 5: mod_base = um
  modified_base 6: mod_base = um
  modified_base 7: mod_base = um
  modified_base 8: mod_base = gm
  modified_base 9: mod_base = OTHER; note = 2'-fluoroadenosine
  modified_base 10: mod_base = OTHER; note = 2'-fluorouridine
  modified_base 11: mod_base = OTHER; note = 2'-fluoroguanosine
  modified_base 12: mod_base = gm
  modified_base 13: mod_base = gm
  modified_base 14: mod_base = cm
  modified_base 15: mod_base = cm
  modified_base 16: mod_base = OTHER; note = 2'-O-methyladenosine
  modified_base 17: mod_base = gm
  modified_base 18: mod_base = gm
  modified_base 19: mod_base = OTHER; note = 2'-O-methyladenosine
  modified_base 20: mod_base = OTHER; note = 2'-O-methyladenosine
  modified_base 21: mod_base = OTHER; note = 2'-O-methyladenosine
  source 1..21: mol_type = other RNA
cccatttgatgggccaggaaa

SEQ ID NO: 471 - RNA, 21 nt, synthetic construct
  modified_base 1: mod_base = cm
  modified_base 1^2: mod_base = OTHER; note = phosphorothioate linkage
  modified_base 2: mod_base = um
  modified_base 3: mod_base = um
  modified_base 4: mod_base = gm
  modified_base 5: mod_base = OTHER; note = 2'-O-methyladenosine
  modified_base 6: mod_base = um
  modified_base 7: mod_base = gm
  modified_base 8: mod_base = gm
  modified_base 9: mod_base = OTHER; note = 2'-fluoroguanosine
  modified_base 10: mod_base = OTHER; note = 2'-fluorocytidine
  modified_base 11: mod_base = OTHER; note = 2'-fluorocytidine
  modified_base 12: mod_base = OTHER; note = 2'-O-methyladenosine
  modified_base 13: mod_base = gm
  modified_base 14: mod_base = gm
  modified_base 15: mod_base = OTHER; note = 2'-O-methyladenosine
  modified_base 16: mod_base = OTHER; note = 2'-O-methyladenosine
  modified_base 17: mod_base = OTHER; note = 2'-O-methyladenosine
  modified_base 18: mod_base = cm
  modified_base 19: mod_base = OTHER; note = 2'-O-methyladenosine
  modified_base 20: mod_base = cm
  modified_base 21: mod_base = OTHER; note = 2'-O-methyladenosine
  source 1..21: mol_type = other RNA
cttgatgggccaggaaacaca

SEQ ID NO: 472 - RNA, 21 nt, synthetic construct
  modified_base 1: mod_base = cm
  modified_base 2: mod_base = OTHER; note = 2'-O-methyladenosine
  modified_base 3: mod_base = gm
  modified_base 4: mod_base = gm
  modified_base 5: mod_base = cm
  modified_base 6: mod_base = um
  modified_base 7: mod_base = cm
  modified_base 8: mod_base = OTHER; note = 2'-O-methyladenosine
  modified_base 9: mod_base = OTHER; note = 2'-fluoroguanosine
  modified_base 10: mod_base = OTHER; note = 2'-fluoroguanosine
  modified_base 11: mod_base = OTHER; note = 2'-fluoroadenosine
  modified_base 12: mod_base = cm
  modified_base 13: mod_base = um
  modified_base 14: mod_base = OTHER; note = 2'-O-methyladenosine
  modified_base 15: mod_base = um
  modified_base 16: mod_base = cm
  modified_base 17: mod_base = um
  modified_base 18: mod_base = cm
  modified_base 19: mod_base = OTHER; note = 2'-O-methyladenosine
  modified_base 20: mod_base = OTHER; note = 2'-O-methyladenosine
  modified_base 21: mod_base = OTHER; note = 2'-O-methyladenosine
  source 1..21: mol_type = other RNA
caggctcaggactatctcaaa

SEQ ID NO: 473 - RNA, 21 nt, synthetic construct
  modified_base 1: mod_base = gm
  modified_base 2: mod_base = um
  modified_base 3: mod_base = cm
  modified_base 4: mod_base = um
  modified_base 5: mod_base = cm
  modified_base 6: mod_base = OTHER; note = 2'-O-methyladenosine
  modified_base 7: mod_base = OTHER; note = 2'-O-methyladenosine
  modified_base 8: mod_base = gm
  modified_base 9: mod_base = OTHER; note = 2'-fluoroadenosine
  modified_base 10: mod_base = OTHER; note = 2'-fluoroguanosine
  modified_base 11: mod_base = OTHER; note = 2'-fluoroadenosine
  modified_base 12: mod_base = um
  modified_base 13: mod_base = um
  modified_base 14: mod_base = um
  modified_base 15: mod_base = um
  modified_base 16: mod_base = OTHER; note = 2'-O-methyladenosine
  modified_base 17: mod_base = um
  modified_base 18: mod_base = cm
  modified_base 19: mod_base = um
  modified_base 20: mod_base = cm
  modified_base 21: mod_base = um
  source 1..21: mol_type = other RNA
gtctcaagagattttatctct

SEQ ID NO: 474 - RNA, 21 nt, synthetic construct
  modified_base 1: mod_base = cm
  modified_base 2: mod_base = OTHER; note = 2-aminoadenosine
  modified_base 3: mod_base = OTHER; note = 2'-O-methyladenosine
  modified_base 4: mod_base = gm
  modified_base 5: mod_base = OTHER; note = 2'-O-methyladenosine
  modified_base 6: mod_base = gm
  modified_base 7: mod_base = OTHER; note = 2'-O-methyladenosine
  modified_base 8: mod_base = um
  modified_base 9: mod_base = OTHER; note = 2'-fluorouridine
  modified_base 10: mod_base = OTHER; note = 2'-fluorouridine
  modified_base 11: mod_base = OTHER; note = 2'-fluorouridine
  modified_base 12: mod_base = OTHER; note = 2'-O-methyladenosine
  modified_base 13: mod_base = um
  modified_base 14: mod_base = cm
  modified_base 15: mod_base = um
  modified_base 16: mod_base = cm
  modified_base 17: mod_base = um
  modified_base 18: mod_base = OTHER; note = 2'-O-methyladenosine
  modified_base 19: mod_base = um
  modified_base 20: mod_base = gm
  modified_base 21: mod_base = OTHER; note = 2'-O-methyladenosine
  source 1..21: mol_type = other RNA
caagagattttatctctatga

SEQ ID NO: 475 - RNA, 21 nt, synthetic construct
  modified_base 1: mod_base = gm
  modified_base 2: mod_base = OTHER; note = 2'-O-methyladenosine
  modified_base 3: mod_base = gm
  modified_base 4: mod_base = OTHER; note = 2'-O-methyladenosine
  modified_base 5: mod_base = um
  modified_base 6: mod_base = um
  modified_base 7: mod_base = um
  modified_base 8: mod_base = um
  modified_base 9: mod_base = OTHER; note = 2'-fluoroadenosine
  modified_base 10: mod_base = OTHER; note = 2'-fluorouridine
  modified_base 11: mod_base = OTHER; note = 2'-fluorocytidine
  modified_base 12: mod_base = um
  modified_base 13: mod_base = cm
  modified_base 14: mod_base = um
  modified_base 15: mod_base = OTHER; note = 2'-O-methyladenosine
  modified_base 16: mod_base = um
  modified_base 17: mod_base = gm
  modified_base 18: mod_base = OTHER; note = 2'-O-methyladenosine
  modified_base 19: mod_base = cm
  modified_base 20: mod_base = um
  modified_base 21: mod_base = OTHER; note = 2'-O-methyladenosine
  source 1..21: mol_type = other RNA
gagattttatctctatgacta

SEQ ID NO: 476 - RNA, 21 nt, synthetic construct
  modified_base 1: mod_base = gm
  modified_base 2: mod_base = OTHER; note = 2'-O-methyladenosine
  modified_base 3: mod_base = um
  modified_base 4: mod_base = gm
  modified_base 5: mod_base = um
  modified_base 6: mod_base = gm
  modified_base 7: mod_base = gm
  modified_base 8: mod_base = OTHER; note = 2'-O-methyladenosine
  modified_base 9: mod_base = OTHER; note = 2'-fluoroguanosine
  modified_base 10: mod_base = OTHER; note = 2'-fluorouridine
  modified_base 11: mod_base = OTHER; note = 2'-fluoroguanosine
  modified_base 12: mod_base = cm
  modified_base 13: mod_base = cm
  modified_base 14: mod_base = OTHER; note = 2'-O-methyladenosine
  modified_base 15: mod_base = gm
  modified_base 16: mod_base = OTHER; note = 2'-O-methyladenosine
  modified_base 17: mod_base = um
  modified_base 18: mod_base = gm
  modified_base 19: mod_base = um
  modified_base 20: mod_base = um
  modified_base 21: mod_base = OTHER; note = 2'-O-methyladenosine
  source 1..21: mol_type = other RNA
gatgtggagtgccagatgtta

SEQ ID NO: 477 - RNA, 21 nt, synthetic construct
  modified_base 1: mod_base = gm
  modified_base 2: mod_base = gm
  modified_base 3: mod_base = OTHER; note = 2'-O-methyladenosine
  modified_base 4: mod_base = gm
  modified_base 5: mod_base = um
  modified_base 6: mod_base = gm
  modified_base 7: mod_base = cm
  modified_base 8: mod_base = cm
  modified_base 9: mod_base = OTHER; note = 2'-fluoroadenosine
  modified_base 10: mod_base = OTHER; note = 2'-fluoroguanosine
  modified_base 11: mod_base = OTHER; note = 2'-fluoroadenosine
  modified_base 12: mod_base = um
  modified_base 13: mod_base = gm
  modified_base 14: mod_base = um
  modified_base 15: mod_base = um
  modified_base 16: mod_base = OTHER; note = 2-O-methylinosine
  modified_base 17: mod_base = cm
  modified_base 18: mod_base = OTHER; note = 2'-O-methyladenosine
  modified_base 19: mod_base = gm
  modified_base 20: mod_base = OTHER; note = 2'-O-methyladenosine
  modified_base 21: mod_base = OTHER; note = 2'-O-methyladenosine
  source 1..21: mol_type = other RNA
ggagtgccagatgttncagaa

SEQ ID NO: 478 - RNA, 21 nt, synthetic construct
  modified_base 1: mod_base = gm
  modified_base 2: mod_base = cm
  modified_base 3: mod_base = cm
  modified_base 4: mod_base = OTHER; note = 2'-O-methyladenosine
  modified_base 5: mod_base = gm
  modified_base 6: mod_base = OTHER; note = 2'-O-methyladenosine
  modified_base 7: mod_base = um
  modified_base 8: mod_base = gm
  modified_base 9: mod_base = OTHER; note = 2'-fluorouridine
  modified_base 10: mod_base = OTHER; note = 2'-fluorouridine
  modified_base 11: mod_base = OTHER; note = 2'-fluoroguanosine
  modified_base 12: mod_base = cm
  modified_base 13: mod_base = OTHER; note = 2'-O-methyladenosine
  modified_base 14: mod_base = gm
  modified_base 15: mod_base = OTHER; note = 2'-O-methyladenosine
  modified_base 16: mod_base = OTHER; note = 2'-O-methyladenosine
  modified_base 17: mod_base = um
  modified_base 18: mod_base = OTHER; note = 2'-O-methyladenosine
  modified_base 19: mod_base = cm
  modified_base 20: mod_base = um
  modified_base 21: mod_base = OTHER; note = 2'-O-methyladenosine
  source 1..21: mol_type = other RNA
gccagatgttgcagaatacta

SEQ ID NO: 479 - RNA, 21 nt, synthetic construct
  modified_base 1: mod_base = gm
  modified_base 2: mod_base = gm
  modified_base 3: mod_base = um
  modified_base 4: mod_base = um
  modified_base 5: mod_base = gm
  modified_base 6: mod_base = cm
  modified_base 7: mod_base = OTHER; note = 2'-O-methyladenosine
  modified_base 8: mod_base = gm
  modified_base 9: mod_base = OTHER; note = 2'-fluoroadenosine
  modified_base 10: mod_base = OTHER; note = 2'-fluoroadenosine
  modified_base 11: mod_base = OTHER; note = 2'-fluorouridine
  modified_base 12: mod_base = OTHER; note = 2'-O-methyladenosine
  modified_base 13: mod_base = cm
  modified_base 14: mod_base = um
  modified_base 15: mod_base = cm
  modified_base 16: mod_base = OTHER; note = 2'-O-methyladenosine
  modified_base 17: mod_base = cm
  modified_base 18: mod_base = um
  modified_base 19: mod_base = OTHER; note = 2'-O-methyladenosine
  modified_base 20: mod_base = um
  modified_base 21: mod_base = um
  source 1..21: mol_type = other RNA
ggttgcagaatactcactatt

SEQ ID NO: 480 - RNA, 21 nt, synthetic construct
  modified_base 1: mod_base = gm
  modified_base 2: mod_base = um
  modified_base 3: mod_base = um
  modified_base 4: mod_base = gm
  modified_base 5: mod_base = cm
  modified_base 6: mod_base = OTHER; note = 2'-O-methyladenosine
  modified_base 7: mod_base = gm
  modified_base 8: mod_base = OTHER; note = 2'-O-methyladenosine
  modified_base 9: mod_base = OTHER; note = 2'-fluoroadenosine
  modified_base 10: mod_base = OTHER; note = 2'-fluorouridine
  modified_base 11: mod_base = OTHER; note = 2'-fluoroadenosine
  modified_base 12: mod_base = cm
  modified_base 13: mod_base = um
  modified_base 14: mod_base = cm
  modified_base 15: mod_base = OTHER; note = 2'-O-methyladenosine
  modified_base 16: mod_base = cm
  modified_base 17: mod_base = um
  modified_base 18: mod_base = OTHER; note = 2'-O-methyladenosine
  modified_base 19: mod_base = um
  modified_base 20: mod_base = um
  modified_base 21: mod_base = um
  source 1..21: mol_type = other RNA
gttgcagaatactcactattt

SEQ ID NO: 481 - RNA, 21 nt, synthetic construct
  modified_base 1: mod_base = gm
  modified_base 2: mod_base = um
  modified_base 3: mod_base = um
  modified_base 4: mod_base = OTHER; note = 2'-O-methyladenosine
  modified_base 5: mod_base = cm
  modified_base 6: mod_base = OTHER; note = 2'-O-methyladenosine
  modified_base 7: mod_base = gm
  modified_base 8: mod_base = um
  modified_base 9: mod_base = OTHER; note = 2'-fluoroguanosine
  modified_base 10: mod_base = OTHER; note = 2'-fluoroguanosine
  modified_base 11: mod_base = OTHER; note = 2'-fluoroadenosine
  modified_base 12: mod_base = um
  modified_base 13: mod_base = cm
  modified_base 14: mod_base = gm
  modified_base 15: mod_base = OTHER; note = 2'-O-methyladenosine
  modified_base 16: mod_base = um
  modified_base 17: mod_base = um
  modified_base 18: mod_base = OTHER; note = 2'-O-methyladenosine
  modified_base 19: mod_base = gm
  modified_base 20: mod_base = um
  modified_base 21: mod_base = OTHER; note = 2'-O-methyladenosine
  source 1..21: mol_type = other RNA
gttacagtggatcgattagta

SEQ ID NO: 482 - RNA, 21 nt, synthetic construct
  modified_base 1: mod_base = gm
  modified_base 2: mod_base = um
  modified_base 3: mod_base = OTHER; note = 2'-O-methyladenosine
  modified_base 4: mod_base = cm
  modified_base 5: mod_base = OTHER; note = 2'-O-methyladenosine
  modified_base 6: mod_base = gm
  modified_base 7: mod_base = um
  modified_base 8: mod_base = gm
  modified_base 9: mod_base = OTHER; note = 2'-fluoroguanosine
  modified_base 10: mod_base = OTHER; note = 2'-fluoroadenosine
  modified_base 11: mod_base = OTHER; note = 2'-fluorouridine
  modified_base 12: mod_base = cm
  modified_base 13: mod_base = gm
  modified_base 14: mod_base = OTHER; note = 2'-O-methyladenosine
  modified_base 15: mod_base = um
  modified_base 16: mod_base = um
  modified_base 17: mod_base = OTHER; note = 2'-O-methyladenosine
  modified_base 18: mod_base = OTHER; note = 2-O-methylinosine
  modified_base 19: mod_base = um
  modified_base 20: mod_base = gm
  modified_base 21: mod_base = um
  source 1..21: mol_type = other RNA
gtacagtggatcgattantgt

SEQ ID NO: 483 - RNA, 21 nt, synthetic construct
  modified_base 1: mod_base = cm
  modified_base 2: mod_base = OTHER; note = 2'-O-methyladenosine
  modified_base 3: mod_base = gm
  modified_base 4: mod_base = um
  modified_base 5: mod_base = gm
  modified_base 6: mod_base = gm
  modified_base 7: mod_base = OTHER; note = 2'-O-methyladenosine
  modified_base 8: mod_base = um
  modified_base 9: mod_base = OTHER; note = 2'-fluorocytidine
  modified_base 10: mod_base = OTHER; note = 2'-fluoroguanosine
  modified_base 11: mod_base = OTHER; note = 2'-fluoroadenosine
  modified_base 12: mod_base = um
  modified_base 13: mod_base = um
  modified_base 14: mod_base = OTHER; note = 2'-O-methyladenosine
  modified_base 15: mod_base = gm
  modified_base 16: mod_base = um
  modified_base 17: mod_base = OTHER; note = 2-O-methylinosine
  modified_base 18: mod_base = um
  modified_base 19: mod_base = cm
  modified_base 20: mod_base = OTHER; note = 2'-O-methyladenosine
  modified_base 21: mod_base = OTHER; note = 2'-O-methyladenosine
  source 1..21: mol_type = other RNA
cagtggatcgattagtntcaa

SEQ ID NO: 484 - RNA, 21 nt, synthetic construct
  modified_base 1: mod_base = OTHER; note = 2'-O-methyladenosine
  modified_base 2: mod_base = gm
  modified_base 3: mod_base = gm
  modified_base 4: mod_base = OTHER; note = 2'-O-methyladenosine
  modified_base 5: mod_base = gm
  modified_base 6: mod_base = OTHER; note = 2'-O-methyladenosine
  modified_base 7: mod_base = um
  modified_base 8: mod_base = gm
  modified_base 9: mod_base = OTHER; note = 2'-fluorocytidine
  modified_base 10: mod_base = OTHER; note = 2'-fluorouridine
  modified_base 11: mod_base = OTHER; note = 2'-fluorocytidine
  modified_base 12: mod_base = OTHER; note = 2'-O-methyladenosine
  modified_base 13: mod_base = cm
  modified_base 14: mod_base = um
  modified_base 15: mod_base = um
  modified_base 16: mod_base = cm
  modified_base 17: mod_base = OTHER; note = 2-O-methylinosine
  modified_base 18: mod_base = OTHER; note = 2'-O-methyladenosine
  modified_base 19: mod_base = um
  modified_base 20: mod_base = gm
  modified_base 21: mod_base = OTHER; note = 2'-O-methyladenosine
  source 1..21: mol_type = other RNA
aggagatgctcacttcnatga

SEQ ID NO: 485 - RNA, 21 nt, synthetic construct
  modified_base 1: mod_base = gm
  modified_base 2: mod_base = gm
  modified_base 3: mod_base = OTHER; note = 2'-O-methyladenosine
  modified_base 4: mod_base = um
  modified_base 5: mod_base = um
  modified_base 6: mod_base = OTHER; note = 2'-O-methyladenosine
  modified_base 7: mod_base = OTHER; note = 2'-O-methyladenosine
  modified_base 8: mod_base = cm
  modified_base 9: mod_base = OTHER; note = 2'-fluorouridine
  modified_base 10: mod_base = OTHER; note = 2'-fluorouridine
  modified_base 11: mod_base = OTHER; note = 2'-fluorocytidine
  modified_base 12: mod_base = cm
  modified_base 13: mod_base = um
  modified_base 14: mod_base = gm
  modified_base 15: mod_base = um
  modified_base 16: mod_base = OTHER; note = 2'-O-methyladenosine
  modified_base 17: mod_base = um
  modified_base 18: mod_base = gm
  modified_base 19: mod_base = cm
  modified_base 20: mod_base = um
  modified_base 21: mod_base = OTHER; note = 2'-O-methyladenosine
  source 1..21: mol_type = other RNA
ggattaacttcctgtatgcta

SEQ ID NO: 486 - RNA, 21 nt, synthetic construct
  modified_base 1: mod_base = gm
  modified_base 2: mod_base = cm
  modified_base 3: mod_base = OTHER; note = 2'-O-methyladenosine
  modified_base 4: mod_base = gm
  modified_base 5: mod_base = um
  modified_base 6: mod_base = gm
  modified_base 7: mod_base = OTHER; note = 2'-O-methyladenosine
  modified_base 8: mod_base = um
  modified_base 9: mod_base = OTHER; note = 2'-fluoroguanosine
  modified_base 10: mod_base = OTHER; note = 2'-fluorouridine
  modified_base 11: mod_base = OTHER; note = 2'-fluoroadenosine
  modified_base 12: mod_base = um
  modified_base 13: mod_base = cm
  modified_base 14: mod_base = cm
  modified_base 15: mod_base = OTHER; note = 2'-O-methyladenosine
  modified_base 16: mod_base = OTHER; note = 2'-O-methyladenosine
  modified_base 17: mod_base = cm
  modified_base 18: mod_base = cm
  modified_base 19: mod_base = um
  modified_base 20: mod_base = OTHER; note = 2'-O-methyladenosine
  modified_base 21: mod_base = um
  source 1..21: mol_type = other RNA
gcagtgatgtatccaacctat

SEQ ID NO: 487 - RNA, 21 nt, synthetic construct
  modified_base 1: mod_base = gm
  modified_base 2: mod_base = um
  modified_base 3: mod_base = gm
  modified_base 4: mod_base = um
  modified_base 5: mod_base = OTHER; note = 2'-O-methyladenosine
  modified_base 6: mod_base = um
  modified_base 7: mod_base = cm
  modified_base 8: mod_base = cm
  modified_base 9: mod_base = OTHER; note = 2'-fluoroadenosine
  modified_base 10: mod_base = OTHER; note = 2'-fluoroadenosine
  modified_base 11: mod_base = OTHER; note = 2'-fluorocytidine
  modified_base 12: mod_base = cm
  modified_base 13: mod_base = um
  modified_base 14: mod_base = OTHER; note = 2'-O-methyladenosine
  modified_base 15: mod_base = um
  modified_base 16: mod_base = gm
  modified_base 17: mod_base = gm
  modified_base 18: mod_base = OTHER; note = 2'-O-methyladenosine
  modified_base 19: mod_base = OTHER; note = 2'-O-methyladenosine
  modified_base 20: mod_base = OTHER; note = 2'-O-methyladenosine
  modified_base 21: mod_base = um
  source 1..21: mol_type = other RNA
gtgtatccaacctatggaaat

SEQ ID NO: 488 - RNA, 21 nt, synthetic construct
  modified_base 1: mod_base = um
  modified_base 2: mod_base = cm
  modified_base 3: mod_base = cm
  modified_base 4: mod_base = cm
  modified_base 5: mod_base = OTHER; note = 2'-O-methyladenosine
  modified_base 6: mod_base = gm
  modified_base 7: mod_base = gm
  modified_base 8: mod_base = OTHER; note = 2'-O-methyladenosine
  modified_base 9: mod_base = OTHER; note = 2'-fluorouridine
  modified_base 10: mod_base = OTHER; note = 2'-fluoroguanosine
  modified_base 11: mod_base = OTHER; note = 2'-fluoroadenosine
  modified_base 12: mod_base = um
  modified_base 13: mod_base = OTHER; note = 2'-O-methyladenosine
  modified_base 14: mod_base = um
  modified_base 15: mod_base = um
  modified_base 16: mod_base = OTHER; note = 2'-O-methyladenosine
  modified_base 17: mod_base = OTHER; note = 2'-O-methyladenosine
  modified_base 18: mod_base = OTHER; note = 2'-O-methyladenosine
  modified_base 19: mod_base = gm
  modified_base 20: mod_base = gm
  modified_base 21: mod_base = OTHER; note = 2'-O-methyladenosine
  source 1..21: mol_type = other RNA
tcccaggatgatattaaagga

SEQ ID NO: 489 - RNA, 21 nt, synthetic construct
  modified_base 1: mod_base = gm
  modified_base 2: mod_base = OTHER; note = 2'-O-methyladenosine
  modified_base 3: mod_base = OTHER; note = 2'-O-methyladenosine
  modified_base 4: mod_base = OTHER; note = 2'-O-methyladenosine
  modified_base 5: mod_base = gm
  modified_base 6: mod_base = gm
  modified_base 7: mod_base = cm
  modified_base 8: mod_base = OTHER; note = 2'-O-methyladenosine
  modified_base 9: mod_base = OTHER; note = 2'-fluorouridine
  modified_base 10: mod_base = OTHER; note = 2'-fluorouridine
  modified_base 11: mod_base = OTHER; note = 2'-fluorocytidine
  modified_base 12: mod_base = OTHER; note = 2'-O-methyladenosine
  modified_base 13: mod_base = gm
  modified_base 14: mod_base = OTHER; note = 2'-O-methyladenosine
  modified_base 15: mod_base = OTHER; note = 2'-O-methyladenosine
  modified_base 16: mod_base = OTHER; note = 2'-O-methyladenosine
  modified_base 17: mod_base = cm
  modified_base 18: mod_base = um
  modified_base 19: mod_base = OTHER; note = 2'-O-methyladenosine
  modified_base 20: mod_base = um
  modified_base 21: mod_base = OTHER; note = 2'-O-methyladenosine
  source 1..21: mol_type = other RNA
gaaaggcattcagaaactata

SEQ ID NO: 490 - RNA, 21 nt, synthetic construct
  modified_base 1: mod_base = gm
  modified_base 2: mod_base = um
  modified_base 3: mod_base = gm
  modified_base 4: mod_base = um
  modified_base 5: mod_base = um
  modified_base 6: mod_base = gm
  modified_base 7: mod_base = cm
  modified_base 8: mod_base = OTHER; note = 2'-O-methyladenosine
  modified_base 9: mod_base = OTHER; note = 2'-fluorocytidine
  modified_base 10: mod_base = OTHER; note = 2'-fluoroadenosine
  modified_base 11: mod_base = OTHER; note = 2'-fluoroadenosine
  modified_base 12: mod_base = um
  modified_base 13: mod_base = cm
  modified_base 14: mod_base = OTHER; note = 2'-O-methyladenosine
  modified_base 15: mod_base = gm
  modified_base 16: mod_base = OTHER; note = 2'-O-methyladenosine
  modified_base 17: mod_base = OTHER; note = 2'-O-methyladenosine
  modified_base 18: mod_base = um
  modified_base 19: mod_base = um
  modified_base 20: mod_base = gm
  modified_base 21: mod_base = OTHER; note = 2'-O-methyladenosine
  source 1..21: mol_type = other RNA
gtgttgcacaatcagaattga

SEQ ID NO: 491 - RNA, 21 nt, synthetic construct
  modified_base 1: mod_base = gm
  modified_base 2: mod_base = gm
  modified_base 3: mod_base = um
  modified_base 4: mod_base = um
  modified_base 5: mod_base = gm
  modified_base 6: mod_base = cm
  modified_base 7: mod_base = OTHER; note = 2'-O-methyladenosine
  modified_base 8: mod_base = cm
  modified_base 9: mod_base = OTHER; note = 2'-fluoroadenosine
  modified_base 10: mod_base = OTHER; note = 2'-fluoroadenosine
  modified_base 11: mod_base = OTHER; note = 2'-fluorouridine
  modified_base 12: mod_base = cm
  modified_base 13: mod_base = OTHER; note = 2'-O-methyladenosine
  modified_base 14: mod_base = gm
  modified_base 15: mod_base = OTHER; note = 2'-O-methyladenosine
  modified_base 16: mod_base = OTHER; note = 2'-O-methyladenosine
  modified_base 17: mod_base = um
  modified_base 18: mod_base = um
  modified_base 19: mod_base = gm
  modified_base 20: mod_base = OTHER; note = 2'-O-methyladenosine
  modified_base 21: mod_base = um
  source 1..21: mol_type = other RNA
ggttgcacaatcagaattgat

SEQ ID NO: 492 - RNA, 21 nt, synthetic construct
  modified_base 1: mod_base = cm
  modified_base 2: mod_base = OTHER; note = 2'-O-methyladenosine
  modified_base 3: mod_base = cm
  modified_base 4: mod_base = OTHER; note = 2'-O-methyladenosine
  modified_base 5: mod_base = OTHER; note = 2'-O-methyladenosine
  modified_base 6: mod_base = um
  modified_base 7: mod_base = cm
  modified_base 8: mod_base = OTHER; note = 2'-O-methyladenosine
  modified_base 9: mod_base = OTHER; note = 2'-fluoroguanosine
  modified_base 10: mod_base = OTHER; note = 2'-fluoroadenosine
  modified_base 11: mod_base = OTHER; note = 2'-fluoroadenosine
  modified_base 12: mod_base = um
  modified_base 13: mod_base = um
  modified_base 14: mod_base = gm
  modified_base 15: mod_base = OTHER; note = 2'-O-methyladenosine
  modified_base 16: mod_base = um
  modified_base 17: mod_base = OTHER; note = 2'-O-methyladenosine
  modified_base 18: mod_base = OTHER; note = 2'-O-methyladenosine
  modified_base 19: mod_base = gm
  modified_base 20: mod_base = cm
  modified_base 21: mod_base = OTHER; note = 2'-O-methyladenosine
  source 1..21: mol_type = other RNA
cacaatcagaattgataagca

SEQ ID NO: 493 - RNA, 21 nt, synthetic construct
  modified_base 1: mod_base = gm
  modified_base 2: mod_base = cm
  modified_base 3: mod_base = OTHER; note = 2'-O-methyladenosine
  modified_base 4: mod_base = OTHER; note = 2'-O-methyladenosine
  modified_base 5: mod_base = um
  modified_base 6: mod_base = cm
  modified_base 7: mod_base = OTHER; note = 2'-O-methyladenosine
  modified_base 8: mod_base = gm
  modified_base 9: mod_base = OTHER; note = 2'-fluoroadenosine
  modified_base 10: mod_base = OTHER; note = 2'-fluoroadenosine
  modified_base 11: mod_base = OTHER; note = 2'-fluorouridine
  modified_base 12: mod_base = um
  modified_base 13: mod_base = gm
  modified_base 14: mod_base = OTHER; note = 2'-O-methyladenosine
  modified_base 15: mod_base = um
  modified_base 16: mod_base = OTHER; note = 2'-O-methyladenosine
  modified_base 17: mod_base = OTHER; note = 2'-O-methyladenosine
  modified_base 18: mod_base = gm
  modified_base 19: mod_base = cm
  modified_base 20: mod_base = OTHER; note = 2'-O-methyladenosine
  modified_base 21: mod_base = OTHER; note = 2'-O-methyladenosine
  source 1..21: mol_type = other RNA
gcaatcagaattgataagcaa

SEQ ID NO: 494 - RNA, 21 nt, synthetic construct
  modified_base 1: mod_base = gm
  modified_base 2: mod_base = um
  modified_base 3: mod_base = gm
  modified_base 4: mod_base = um
  modified_base 5: mod_base = cm
  modified_base 6: mod_base = OTHER; note = 2'-O-methyladenosine
  modified_base 7: mod_base = cm
  modified_base 8: mod_base = cm
  modified_base 9: mod_base = OTHER; note = 2'-fluorocytidine
  modified_base 10: mod_base = OTHER; note = 2'-fluorouridine
  modified_base 11: mod_base = OTHER; note = 2'-fluorouridine
  modified_base 12: mod_base = um
  modified_base 13: mod_base = um
  modified_base 14: mod_base = um
  modified_base 15: mod_base = um
  modified_base 16: mod_base = OTHER; note = 2'-O-methyladenosine
  modified_base 17: mod_base = um
  modified_base 18: mod_base = um
  modified_base 19: mod_base = gm
  modified_base 20: mod_base = cm
  modified_base 21: mod_base = OTHER; note = 2'-O-methyladenosine
  source 1..21: mol_type = other RNA
gtgtcacccttttttattgca

SEQ ID NO: 495 - RNA, 21 nt, synthetic construct
  modified_base 1: mod_base = gm
  modified_base 2: mod_base = um
  modified_base 3: mod_base = gm
  modified_base 4: mod_base = cm
  modified_base 5: mod_base = OTHER; note = 2'-O-methyladenosine
  modified_base 6: mod_base = gm
  modified_base 7: mod_base = um
  modified_base 8: mod_base = um
  modified_base 9: mod_base = OTHER; note = 2'-fluoroguanosine
  modified_base 10: mod_base = OTHER; note = 2'-fluoroguanosine
  modified_base 11: mod_base = OTHER; note = 2'-fluorouridine
  modified_base 12: mod_base = um
  modified_base 13: mod_base = um
  modified_base 14: mod_base = um
  modified_base 15: mod_base = um
  modified_base 16: mod_base = gm
  modified_base 17: mod_base = OTHER; note = 2'-O-methyladenosine
  modified_base 18: mod_base = OTHER; note = 2'-O-methyladenosine
  modified_base 19: mod_base = um
  modified_base 20: mod_base = gm
  modified_base 21: mod_base = um
  source 1..21: mol_type = other RNA
gtgcagttggtttttgaatgt

SEQ ID NO: 496 - RNA, 21 nt, synthetic construct
  modified_base 1: mod_base = gm
  modified_base 2: mod_base = cm
  modified_base 3: mod_base = OTHER; note = 2'-O-methyladenosine
  modified_base 4: mod_base = gm
  modified_base 5: mod_base = um
  modified_base 6: mod_base = um
  modified_base 7: mod_base = gm
  modified_base 8: mod_base = gm
  modified_base 9: mod_base = OTHER; note = 2'-fluorouridine
  modified_base 10: mod_base = OTHER; note = 2'-fluorouridine
  modified_base 11: mod_base = OTHER; note = 2'-fluorouridine
  modified_base 12: mod_base = um
  modified_base 13: mod_base = um
  modified_base 14: mod_base = gm
  modified_base 15: mod_base = OTHER; note = 2'-O-methyladenosine
  modified_base 16: mod_base = OTHER; note = 2'-O-methyladenosine
  modified_base 17: mod_base = um
  modified_base 18: mod_base = gm
  modified_base 19: mod_base = um
  modified_base 20: mod_base = cm
  modified_base 21: mod_base = um
  source 1..21: mol_type = other RNA
gcagttggtttttgaatgtct

SEQ ID NO: 497 - RNA, 21 nt, synthetic construct
  modified_base 1: mod_base = cm
  modified_base 2: mod_base = OTHER; note = 2'-O-methyladenosine
  modified_base 3: mod_base = gm
  modified_base 4: mod_base = um
  modified_base 5: mod_base = um
  modified_base 6: mod_base = gm
  modified_base 7: mod_base = gm
  modified_base 8: mod_base = um
  modified_base 9: mod_base = OTHER; note = 2'-fluorouridine
  modified_base 10: mod_base = OTHER; note = 2'-fluorouridine
  modified_base 11: mod_base = OTHER; note = 2'-fluorouridine
  modified_base 12: mod_base = um
  modified_base 13: mod_base = gm
  modified_base 14: mod_base = OTHER; note = 2'-O-methyladenosine
  modified_base 15: mod_base = OTHER; note = 2'-O-methyladenosine
  modified_base 16: mod_base = um
  modified_base 17: mod_base = gm
  modified_base 18: mod_base = um
  modified_base 19: mod_base = cm
  modified_base 20: mod_base = um
  modified_base 21: mod_base = um
  source 1..21: mol_type = other RNA
cagttggtttttgaatgtctt

SEQ ID NO: 498 - RNA, 21 nt, synthetic construct
  modified_base 1: mod_base = cm
  modified_base 2: mod_base = OTHER; note = 2'-O-methyladenosine
  modified_base 3: mod_base = cm
  modified_base 4: mod_base = um
  modified_base 5: mod_base = cm
  modified_base 6: mod_base = cm
  modified_base 7: mod_base = um
  modified_base 8: mod_base = um
  modified_base 9: mod_base = OTHER; note = 2'-fluorouridine
  modified_base 10: mod_base = OTHER; note = 2'-fluorouridine
  modified_base 11: mod_base = OTHER; note = 2'-fluoroadenosine
  modified_base 12: mod_base = OTHER; note = 2'-O-methyladenosine
  modified_base 13: mod_base = gm
  modified_base 14: mod_base = gm
  modified_base 15: mod_base = OTHER; note = 2'-O-methyladenosine
  modified_base 16: mod_base = um
  modified_base 17: mod_base = OTHER; note = 2'-O-methyladenosine
  modified_base 18: mod_base = OTHER; note = 2'-O-methyladenosine
  modified_base 19: mod_base = OTHER; note = 2'-O-methyladenosine
  modified_base 20: mod_base = cm
  modified_base 21: mod_base = um
  source 1..21: mol_type = other RNA
cactccttttaaggataaact

SEQ ID NO: 499 - RNA, 21 nt, synthetic construct
  modified_base 1: mod_base = gm
  modified_base 1^2: mod_base = OTHER; note = phosphorothioate linkage
  modified_base 2: mod_base = OTHER; note = 2'-O-methyladenosine
  modified_base 3: mod_base = um
  modified_base 4: mod_base = gm
  modified_base 5: mod_base = um
  modified_base 6: mod_base = gm
  modified_base 7: mod_base = gm
  modified_base 8: mod_base = OTHER; note = 2'-O-methyladenosine
  modified_base 9: mod_base = OTHER; note = 2'-fluoroguanosine
  modified_base 10: mod_base = OTHER; note = 2'-fluorouridine
  modified_base 11: mod_base = OTHER; note = 2'-fluoroguanosine
  modified_base 12: mod_base = cm
  modified_base 13: mod_base = cm
  modified_base 14: mod_base = OTHER; note = 2'-O-methyladenosine
  modified_base 15: mod_base = gm
  modified_base 16: mod_base = OTHER; note = 2'-O-methyladenosine
  modified_base 17: mod_base = um
  modified_base 18: mod_base = gm
  modified_base 19: mod_base = um
  modified_base 20: mod_base = um
  modified_base 21: mod_base = OTHER; note = 2'-O-methyladenosine
  source 1..21: mol_type = other RNA
gatgtggagtgccagatgtta

SEQ ID NO: 500 - RNA, 21 nt, synthetic construct
  modified_base 1: mod_base = gm
  modified_base 1^2: mod_base = OTHER; note = phosphorothioate linkage
  modified_base 2: mod_base = OTHER; note = 2'-O-methyladenosine
  modified_base 3: mod_base = um
  modified_base 4: mod_base = gm
  modified_base 5: mod_base = um
  modified_base 6: mod_base = gm
  modified_base 7: mod_base = gm
  modified_base 8: mod_base = OTHER; note = 2'-O-methyladenosine
  modified_base 9: mod_base = OTHER; note = 2'-fluoroguanosine
  modified_base 10: mod_base = um
  modified_base 11: mod_base = OTHER; note = 2'-fluoroguanosine
  modified_base 12: mod_base = cm
  modified_base 13: mod_base = OTHER; note = 2'-fluorocytidine
  modified_base 14: mod_base = OTHER; note = 2'-O-methyladenosine
  modified_base 15: mod_base = gm
  modified_base 16: mod_base = OTHER; note = 2'-O-methyladenosine
  modified_base 17: mod_base = um
  modified_base 18: mod_base = gm
  modified_base 19: mod_base = um
  modified_base 20: mod_base = um
  modified_base 21: mod_base = OTHER; note = 2'-O-methyladenosine
  source 1..21: mol_type = other RNA
gatgtggagtgccagatgtta

SEQ ID NO: 501 - RNA, 21 nt, synthetic construct
  modified_base 1: mod_base = cm
  modified_base 2: mod_base = um
  modified_base 3: mod_base = gm
  modified_base 4: mod_base = um
  modified_base 5: mod_base = um
  modified_base 6: mod_base = gm
  modified_base 7: mod_base = cm
  modified_base 8: mod_base = OTHER; note = 2'-O-methyladenosine
  modified_base 9: mod_base = OTHER; note = 2'-fluorocytidine
  modified_base 10: mod_base = OTHER; note = 2'-fluoroadenosine
  modified_base 11: mod_base = OTHER; note = 2'-fluoroadenosine
  modified_base 12: mod_base = um
  modified_base 13: mod_base = cm
  modified_base 14: mod_base = OTHER; note = 2'-O-methyladenosine
  modified_base 15: mod_base = gm
  modified_base 16: mod_base = OTHER; note = 2'-O-methyladenosine
  modified_base 17: mod_base = OTHER; note = 2'-O-methyladenosine
  modified_base 18: mod_base = um
  modified_base 19: mod_base = um
  modified_base 20: mod_base = gm
  modified_base 21: mod_base = OTHER; note = 2'-O-methyladenosine
  source 1..21: mol_type = other RNA
ctgttgcacaatcagaattga

SEQ ID NO: 502 - RNA, 21 nt, synthetic construct
  modified_base 1: mod_base = gm
  modified_base 2: mod_base = um
  modified_base 3: mod_base = gm
  modified_base 4: mod_base = um
  modified_base 5: mod_base = um
  modified_base 6: mod_base = gm
  modified_base 7: mod_base = OTHER; note = 2'-fluorocytidine
  modified_base 8: mod_base = OTHER; note = 2'-O-methyladenosine
  modified_base 9: mod_base = OTHER; note = 2'-fluorocytidine
  modified_base 10: mod_base = OTHER; note = 2'-O-methyladenosine
  modified_base 11: mod_base = OTHER; note = 2'-fluoroadenosine
  modified_base 12: mod_base = um
  modified_base 13: mod_base = cm
  modified_base 14: mod_base = OTHER; note = 2'-O-methyladenosine
  modified_base 15: mod_base = gm
  modified_base 16: mod_base = OTHER; note = 2'-O-methyladenosine
  modified_base 17: mod_base = OTHER; note = 2'-O-methyladenosine
  modified_base 18: mod_base = um
  modified_base 19: mod_base = um
  modified_base 20: mod_base = gm
  modified_base 21: mod_base = OTHER; note = 2'-O-methyladenosine
  source 1..21: mol_type = other RNA
gtgttgcacaatcagaattga

SEQ ID NO: 503 - RNA, 21 nt, synthetic construct
  modified_base 1: mod_base = gm
  modified_base 2: mod_base = um
  modified_base 3: mod_base = gm
  modified_base 4: mod_base = um
  modified_base 5: mod_base = um
  modified_base 6: mod_base = gm
  modified_base 7: mod_base = cm
  modified_base 8: mod_base = OTHER; note = 2'-O-methyladenosine
  modified_base 9: mod_base = OTHER; note = 2'-fluorocytidine
  modified_base 10: mod_base = OTHER; note = 2'-O-methyladenosine
  modified_base 11: mod_base = OTHER; note = 2'-fluoroadenosine
  modified_base 12: mod_base = um
  modified_base 13: mod_base = OTHER; note = 2'-fluorocytidine
  modified_base 14: mod_base = OTHER; note = 2'-O-methyladenosine
  modified_base 15: mod_base = gm
  modified_base 16: mod_base = OTHER; note = 2'-O-methyladenosine
  modified_base 17: mod_base = OTHER; note = 2'-O-methyladenosine
  modified_base 18: mod_base = um
  modified_base 19: mod_base = um
  modified_base 20: mod_base = gm
  modified_base 21: mod_base = OTHER; note = 2'-O-methyladenosine
  source 1..21: mol_type = other RNA
gtgttgcacaatcagaattga

SEQ ID NO: 504 - RNA, 21 nt, synthetic construct
  modified_base 1: mod_base = gm
  modified_base 2: mod_base = um
  modified_base 3: mod_base = gm
  modified_base 4: mod_base = um
  modified_base 5: mod_base = um
  modified_base 6: mod_base = gm
  modified_base 7: mod_base = cm
  modified_base 8: mod_base = OTHER; note = 2'-O-methyladenosine
  modified_base 9: mod_base = OTHER; note = 2'-fluorocytidine
  modified_base 10: mod_base = OTHER; note = 2'-O-methyladenosine
  modified_base 11: mod_base = OTHER; note = 2'-fluoroadenosine
  modified_base 12: mod_base = um
  modified_base 13: mod_base = cm
  modified_base 14: mod_base = OTHER; note = 2'-O-methyladenosine
  modified_base 15: mod_base = gm
  modified_base 16: mod_base = OTHER; note = 2'-O-methyladenosine
  modified_base 17: mod_base = OTHER; note = 2'-O-methyladenosine
  modified_base 18: mod_base = um
  modified_base 19: mod_base = um
  modified_base 20: mod_base = gm
  modified_base 21: mod_base = OTHER; note = 2'-O-methyladenosine
  source 1..21: mol_type = other RNA
gtgttgcacaatcagaattga

SEQ ID NO: 505 - RNA, 21 nt, synthetic construct
  modified_base 1: mod_base = cm
  modified_base 2: mod_base = OTHER; note = 2'-O-methyladenosine
  modified_base 3: mod_base = gm
  modified_base 4: mod_base = um
  modified_base 5: mod_base = gm
  modified_base 6: mod_base = gm
  modified_base 7: mod_base = OTHER; note = 2'-O-methyladenosine
  modified_base 8: mod_base = um
  modified_base 9: mod_base = OTHER; note = 2'-fluorocytidine
  modified_base 10: mod_base = OTHER; note = 2'-fluoroguanosine
  modified_base 11: mod_base = OTHER; note = 2'-fluoroadenosine
  modified_base 12: mod_base = um
  modified_base 13: mod_base = um
  modified_base 14: mod_base = OTHER; note = 2'-O-methyladenosine
  modified_base 15: mod_base = gm
  modified_base 16: mod_base = um
  modified_base 17: mod_base = gm
  modified_base 18: mod_base = um
  modified_base 19: mod_base = cm
  modified_base 20: mod_base = OTHER; note = 2'-O-methyladenosine
  modified_base 21: mod_base = OTHER; note = 2'-O-methyladenosine
  source 1..21: mol_type = other RNA
cagtggatcgattagtgtcaa

SEQ ID NO: 506 - RNA, 21 nt, synthetic construct
  modified_base 1: mod_base = cm
  modified_base 2: mod_base = OTHER; note = 2'-O-methyladenosine
  modified_base 3: mod_base = gm
  modified_base 4: mod_base = um
  modified_base 5: mod_base = gm
  modified_base 6: mod_base = gm
  modified_base 7: mod_base = OTHER; note = 2'-fluoroadenosine
  modified_base 8: mod_base = um
  modified_base 9: mod_base = OTHER; note = 2'-fluorocytidine
  modified_base 10: mod_base = gm
  modified_base 11: mod_base = OTHER; note = 2'-fluoroadenosine
  modified_base 12: mod_base = um
  modified_base 13: mod_base = um
  modified_base 14: mod_base = OTHER; note = 2'-O-methyladenosine
  modified_base 15: mod_base = gm
  modified_base 16: mod_base = um
  modified_base 17: mod_base = gm
  modified_base 18: mod_base = um
  modified_base 19: mod_base = cm
  modified_base 20: mod_base = OTHER; note = 2'-O-methyladenosine
  modified_base 21: mod_base = OTHER; note = 2'-O-methyladenosine
  source 1..21: mol_type = other RNA
cagtggatcgattagtgtcaa

SEQ ID NO: 507 - RNA, 21 nt, synthetic construct
  modified_base 1: mod_base = cm
  modified_base 2: mod_base = OTHER; note = 2'-O-methyladenosine
  modified_base 3: mod_base = gm
  modified_base 4: mod_base = um
  modified_base 5: mod_base = gm
  modified_base 6: mod_base = gm
  modified_base 7: mod_base = OTHER; note = 2'-O-methyladenosine
  modified_base 8: mod_base = um
  modified_base 9: mod_base = OTHER; note = 2'-fluorocytidine
  modified_base 10: mod_base = gm
  modified_base 11: mod_base = OTHER; note = 2'-fluoroadenosine
  modified_base 12: mod_base = um
  modified_base 13: mod_base = OTHER; note = 2'-fluorouridine
  modified_base 14: mod_base = OTHER; note = 2'-O-methyladenosine
  modified_base 15: mod_base = gm
  modified_base 16: mod_base = um
  modified_base 17: mod_base = gm
  modified_base 18: mod_base = um
  modified_base 19: mod_base = cm
  modified_base 20: mod_base = OTHER; note = 2'-O-methyladenosine
  modified_base 21: mod_base = OTHER; note = 2'-O-methyladenosine
  source 1..21: mol_type = other RNA
cagtggatcgattagtgtcaa

SEQ ID NO: 508 - RNA, 21 nt, synthetic construct
  modified_base 1: mod_base = cm
  modified_base 2: mod_base = OTHER; note = 2'-O-methyladenosine
  modified_base 3: mod_base = gm
  modified_base 4: mod_base = um
  modified_base 5: mod_base = gm
  modified_base 6: mod_base = gm
  modified_base 7: mod_base = OTHER; note = 2'-O-methyladenosine
  modified_base 8: mod_base = um
  modified_base 9: mod_base = OTHER; note = 2'-fluorocytidine
  modified_base 10: mod_base = gm
  modified_base 11: mod_base = OTHER; note = 2'-fluoroadenosine
  modified_base 12: mod_base = um
  modified_base 13: mod_base = OTHER; note = 2'-fluorouridine
  modified_base 14: mod_base = OTHER; note = 2'-O-methyladenosine
  modified_base 15: mod_base = gm
  modified_base 16: mod_base = um
  modified_base 17: mod_base = OTHER; note = 2-O-methylinosine
  modified_base 18: mod_base = um
  modified_base 19: mod_base = cm
  modified_base 20: mod_base = OTHER; note = 2'-O-methyladenosine
  modified_base 21: mod_base = OTHER; note = 2'-O-methyladenosine
  source 1..21: mol_type = other RNA
cagtggatcgattagtntcaa

SEQ ID NO: 509 - RNA, 21 nt, synthetic construct
  modified_base 1: mod_base = um
  modified_base 2: mod_base = cm
  modified_base 3: mod_base = cm
  modified_base 4: mod_base = cm
  modified_base 5: mod_base = OTHER; note = 2'-O-methyladenosine
  modified_base 6: mod_base = gm
  modified_base 7: mod_base = gm
  modified_base 8: mod_base = OTHER; note = 2'-O-methyladenosine
  modified_base 9: mod_base = OTHER; note = 2'-fluorouridine
  modified_base 10: mod_base = OTHER; note = 2'-fluoroguanosine
  modified_base 11: mod_base = OTHER; note = 2'-fluoroadenosine
  modified_base 12: mod_base = um
  modified_base 13: mod_base = OTHER; note = 2'-fluoroadenosine
  modified_base 14: mod_base = um
  modified_base 15: mod_base = um
  modified_base 16: mod_base = OTHER; note = 2'-O-methyladenosine
  modified_base 17: mod_base = OTHER; note = 2'-O-methyladenosine
  modified_base 18: mod_base = OTHER; note = 2'-O-methyladenosine
  modified_base 19: mod_base = gm
  modified_base 20: mod_base = gm
  modified_base 21: mod_base = OTHER; note = 2'-O-methyladenosine
  source 1..21: mol_type = other RNA
tcccaggatgatattaaagga

SEQ ID NO: 510 - RNA, 21 nt, synthetic construct
  modified_base 1: mod_base = um
  modified_base 2: mod_base = cm
  modified_base 3: mod_base = cm
  modified_base 4: mod_base = cm
  modified_base 5: mod_base = OTHER; note = 2'-O-methyladenosine
  modified_base 6: mod_base = gm
  modified_base 7: mod_base = gm
  modified_base 8: mod_base = OTHER; note = 2'-O-methyladenosine
  modified_base 9: mod_base = OTHER; note = 2'-fluorouridine
  modified_base 10: mod_base = gm
  modified_base 11: mod_base = OTHER; note = 2'-fluoroadenosine
  modified_base 12: mod_base = um
  modified_base 13: mod_base = OTHER; note = 2'-fluoroadenosine
  modified_base 14: mod_base = um
  modified_base 15: mod_base = um
  modified_base 16: mod_base = OTHER; note = 2'-O-methyladenosine
  modified_base 17: mod_base = OTHER; note = 2'-O-methyladenosine
  modified_base 18: mod_base = OTHER; note = 2'-O-methyladenosine
  modified_base 19: mod_base = gm
  modified_base 20: mod_base = gm
  modified_base 21: mod_base = OTHER; note = 2'-O-methyladenosine
  source 1..21: mol_type = other RNA
tcccaggatgatattaaagga

SEQ ID NO: 511 - RNA, 21 nt, synthetic construct
  modified_base 1: mod_base = um
  modified_base 2: mod_base = cm
  modified_base 3: mod_base = cm
  modified_base 4: mod_base = cm
  modified_base 5: mod_base = OTHER; note = 2'-O-methyladenosine
  modified_base 6: mod_base = gm
  modified_base 7: mod_base = gm
  modified_base 8: mod_base = OTHER; note = 2'-O-methyladenosine
  modified_base 9: mod_base = OTHER; note = 2'-fluorouridine
  modified_base 10: mod_base = OTHER; note = 2'-fluoroguanosine
  modified_base 11: mod_base = OTHER; note = 2'-fluoroadenosine
  modified_base 12: mod_base = um
  modified_base 13: mod_base = OTHER; note = 2-aminoadenosine
  modified_base 14: mod_base = um
  modified_base 15: mod_base = um
  modified_base 16: mod_base = OTHER; note = 2'-O-methyladenosine
  modified_base 17: mod_base = OTHER; note = 2'-O-methyladenosine
  modified_base 18: mod_base = OTHER; note = 2'-O-methyladenosine
  modified_base 19: mod_base = gm
  modified_base 20: mod_base = gm
  modified_base 21: mod_base = OTHER; note = 2'-O-methyladenosine
  source 1..21: mol_type = other RNA
tcccaggatgatattaaagga

SEQ ID NO: 512 - RNA, 21 nt, synthetic construct
  modified_base 1: mod_base = gm
  modified_base 2: mod_base = cm
  modified_base 3: mod_base = OTHER; note = 2'-O-methyladenosine
  modified_base 4: mod_base = gm
  modified_base 5: mod_base = um
  modified_base 6: mod_base = um
  modified_base 7: mod_base = gm
  modified_base 8: mod_base = gm
  modified_base 9: mod_base = OTHER; note = 2'-fluorouridine
  modified_base 10: mod_base = um
  modified_base 11: mod_base = OTHER; note = 2'-fluorouridine
  modified_base 12: mod_base = um
  modified_base 13: mod_base = OTHER; note = 2'-fluorouridine
  modified_base 14: mod_base = gm
  modified_base 15: mod_base = OTHER; note = 2'-O-methyladenosine
  modified_base 16: mod_base = OTHER; note = 2'-O-methyladenosine
  modified_base 17: mod_base = um
  modified_base 18: mod_base = gm
  modified_base 19: mod_base = um
  modified_base 20: mod_base = cm
  modified_base 21: mod_base = um
  source 1..21: mol_type = other RNA
gcagttggtttttgaatgtct

SEQ ID NO: 513 - RNA, 21 nt, synthetic construct
  modified_base 1: mod_base = gm
  modified_base 2: mod_base = cm
  modified_base 3: mod_base = OTHER; note = 2'-O-methyladenosine
  modified_base 4: mod_base = gm
  modified_base 5: mod_base = um
  modified_base 6: mod_base = um
  modified_base 7: mod_base = gm
  modified_base 8: mod_base = gm
  modified_base 9: mod_base = OTHER; note = 2'-fluorouridine
  modified_base 10: mod_base = OTHER; note = 2'-fluorouridine
  modified_base 11: mod_base = OTHER; note = 2'-fluorouridine
  modified_base 12: mod_base = um
  modified_base 13: mod_base = OTHER; note = 2'-fluorouridine
  modified_base 14: mod_base = gm
  modified_base 15: mod_base = OTHER; note = 2'-O-methyladenosine
  modified_base 16: mod_base = OTHER; note = 2'-O-methyladenosine
  modified_base 17: mod_base = um
  modified_base 18: mod_base = gm
  modified_base 19: mod_base = um
  modified_base 20: mod_base = cm
  modified_base 21: mod_base = um
  source 1..21: mol_type = other RNA
gcagttggtttttgaatgtct

SEQ ID NO: 514 - RNA, 21 nt, synthetic construct
  modified_base 1: mod_base = gm
  modified_base 2: mod_base = cm
  modified_base 3: mod_base = OTHER; note = 2'-O-methyladenosine
  modified_base 4: mod_base = gm
  modified_base 5: mod_base = um
  modified_base 6: mod_base = gm
  modified_base 7: mod_base = OTHER; note = 2'-O-methyladenosine
  modified_base 8: mod_base = um
  modified_base 9: mod_base = OTHER; note = 2'-fluoroguanosine
  modified_base 10: mod_base = um
  modified_base 11: mod_base = OTHER; note = 2'-fluoroadenosine
  modified_base 12: mod_base = OTHER; note = 2'-fluorouridine
  modified_base 13: mod_base = cm
  modified_base 14: mod_base = cm
  modified_base 15: mod_base = OTHER; note = 2'-O-methyladenosine
  modified_base 16: mod_base = OTHER; note = 2'-O-methyladenosine
  modified_base 17: mod_base = cm
  modified_base 18: mod_base = cm
  modified_base 19: mod_base = um
  modified_base 20: mod_base = OTHER; note = 2'-O-methyladenosine
  modified_base 21: mod_base = um
  source 1..21: mol_type = other RNA
gcagtgatgtatccaacctat

SEQ ID NO: 515 - RNA, 21 nt, synthetic construct
  modified_base 1: mod_base = gm
  modified_base 2: mod_base = cm
  modified_base 3: mod_base = OTHER; note = 2'-O-methyladenosine
  modified_base 4: mod_base = gm
  modified_base 5: mod_base = um
  modified_base 6: mod_base = gm
  modified_base 7: mod_base = OTHER; note = 2'-fluoroadenosine
  modified_base 8: mod_base = um
  modified_base 9: mod_base = OTHER; note = 2'-fluoroguanosine
  modified_base 10: mod_base = um
  modified_base 11: mod_base = OTHER; note = 2'-fluoroadenosine
  modified_base 12: mod_base = um
  modified_base 13: mod_base = cm
  modified_base 14: mod_base = cm
  modified_base 15: mod_base = OTHER; note = 2'-O-methyladenosine
  modified_base 16: mod_base = OTHER; note = 2'-O-methyladenosine
  modified_base 17: mod_base = cm
  modified_base 18: mod_base = cm
  modified_base 19: mod_base = um
  modified_base 20: mod_base = OTHER; note = 2'-O-methyladenosine
  modified_base 21: mod_base = um
  source 1..21: mol_type = other RNA
gcagtgatgtatccaacctat

SEQ ID NO: 516 - RNA, 21 nt, synthetic construct
  modified_base 1: mod_base = gm
  modified_base 2: mod_base = cm
  modified_base 3: mod_base = OTHER; note = 2'-O-methyladenosine
  modified_base 4: mod_base = gm
  modified_base 5: mod_base = um
  modified_base 6: mod_base = gm
  modified_base 7: mod_base = OTHER; note = 2'-O-methyladenosine
  modified_base 8: mod_base = um
  modified_base 9: mod_base = OTHER; note = 2'-fluoroguanosine
  modified_base 10: mod_base = um
  modified_base 11: mod_base = OTHER; note = 2'-fluoroadenosine
  modified_base 12: mod_base = um
  modified_base 13: mod_base = OTHER; note = 2'-fluorocytidine
  modified_base 14: mod_base = cm
  modified_base 15: mod_base = OTHER; note = 2'-O-methyladenosine
  modified_base 16: mod_base = OTHER; note = 2'-O-methyladenosine
  modified_base 17: mod_base = cm
  modified_base 18: mod_base = cm
  modified_base 19: mod_base = um
  modified_base 20: mod_base = OTHER; note = 2'-O-methyladenosine
  modified_base 21: mod_base = um
  source 1..21: mol_type = other RNA
gcagtgatgtatccaacctat

SEQ ID NO: 517 - RNA, 21 nt, synthetic construct
  modified_base 1: mod_base = gm
  modified_base 2: mod_base = cm
  modified_base 3: mod_base = cm
  modified_base 4: mod_base = OTHER; note = 2'-O-methyladenosine
  modified_base 5: mod_base = gm
  modified_base 6: mod_base = OTHER; note = 2'-O-methyladenosine
  modified_base 7: mod_base = um
  modified_base 8: mod_base = gm
  modified_base 9: mod_base = OTHER; note = 2'-fluorouridine
  modified_base 10: mod_base = um
  modified_base 11: mod_base = OTHER; note = 2'-fluoroguanosine
  modified_base 12: mod_base = cm
  modified_base 13: mod_base = OTHER; note = 2'-fluoroadenosine
  modified_base 14: mod_base = gm
  modified_base 15: mod_base = OTHER; note = 2'-O-methyladenosine
  modified_base 16: mod_base = OTHER; note = 2'-O-methyladenosine
  modified_base 17: mod_base = um
  modified_base 18: mod_base = OTHER; note = 2'-O-methyladenosine
  modified_base 19: mod_base = cm
  modified_base 20: mod_base = um
  modified_base 21: mod_base = OTHER; note = 2'-O-methyladenosine
  source 1..21: mol_type = other RNA
gccagatgttgcagaatacta

SEQ ID NO: 518 - RNA, 21 nt, synthetic construct
  modified_base 1: mod_base = gm
  modified_base 2: mod_base = cm
  modified_base 3: mod_base = cm
  modified_base 4: mod_base = OTHER; note = 2'-O-methyladenosine
  modified_base 5: mod_base = gm
  modified_base 6: mod_base = OTHER; note = 2'-O-methyladenosine
  modified_base 7: mod_base = OTHER; note = 2'-fluorouridine
  modified_base 8: mod_base = gm
  modified_base 9: mod_base = OTHER; note = 2'-fluorouridine
  modified_base 10: mod_base = um
  modified_base 11: mod_base = OTHER; note = 2'-fluoroguanosine
  modified_base 12: mod_base = cm
  modified_base 13: mod_base = OTHER; note = 2'-O-methyladenosine
  modified_base 14: mod_base = gm
  modified_base 15: mod_base = OTHER; note = 2'-O-methyladenosine
  modified_base 16: mod_base = OTHER; note = 2'-O-methyladenosine
  modified_base 17: mod_base = um
  modified_base 18: mod_base = OTHER; note = 2'-O-methyladenosine
  modified_base 19: mod_base = cm
  modified_base 20: mod_base = um
  modified_base 21: mod_base = OTHER; note = 2'-O-methyladenosine
  source 1..21: mol_type = other RNA
gccagatgttgcagaatacta

SEQ ID NO: 519 - RNA, 21 nt, synthetic construct
  modified_base 1: mod_base = cm
  modified_base 2: mod_base = OTHER; note = 2'-O-methyladenosine
  modified_base 3: mod_base = cm
  modified_base 4: mod_base = um
  modified_base 5: mod_base = cm
  modified_base 6: mod_base = cm
  modified_base 7: mod_base = OTHER; note = 2'-fluorouridine
  modified_base 8: mod_base = um
  modified_base 9: mod_base = OTHER; note = 2'-fluorouridine
  modified_base 10: mod_base = um
  modified_base 11: mod_base = OTHER; note = 2'-fluoroadenosine
  modified_base 12: mod_base = OTHER; note = 2'-O-methyladenosine
  modified_base 13: mod_base = gm
  modified_base 14: mod_base = gm
  modified_base 15: mod_base = OTHER; note = 2'-O-methyladenosine
  modified_base 16: mod_base = um
  modified_base 17: mod_base = OTHER; note = 2'-O-methyladenosine
  modified_base 18: mod_base = OTHER; note = 2'-O-methyladenosine
  modified_base 19: mod_base = OTHER; note = 2'-O-methyladenosine
  modified_base 20: mod_base = cm
  modified_base 21: mod_base = um
  source 1..21: mol_type = other RNA
cactccttttaaggataaact

SEQ ID NO: 520 - RNA, 21 nt, synthetic construct
  modified_base 1: mod_base = cm
  modified_base 2: mod_base = OTHER; note = 2'-O-methyladenosine
  modified_base 3: mod_base = cm
  modified_base 4: mod_base = um
  modified_base 5: mod_base = cm
  modified_base 6: mod_base = cm
  modified_base 7: mod_base = um
  modified_base 8: mod_base = um
  modified_base 9: mod_base = OTHER; note = 2'-fluorouridine
  modified_base 10: mod_base = um
  modified_base 11: mod_base = OTHER; note = 2'-fluoroadenosine
  modified_base 12: mod_base = OTHER; note = 2'-fluoroadenosine
  modified_base 13: mod_base = gm
  modified_base 14: mod_base = gm
  modified_base 15: mod_base = OTHER; note = 2'-O-methyladenosine
  modified_base 16: mod_base = um
  modified_base 17: mod_base = OTHER; note = 2'-O-methyladenosine
  modified_base 18: mod_base = OTHER; note = 2'-O-methyladenosine
  modified_base 19: mod_base = OTHER; note = 2'-O-methyladenosine
  modified_base 20: mod_base = cm
  modified_base 21: mod_base = um
  source 1..21: mol_type = other RNA
cactccttttaaggataaact

SEQ ID NO: 521 - RNA, 21 nt, synthetic construct
  modified_base 1: mod_base = gm
  modified_base 2: mod_base = OTHER; note = 2'-O-methyladenosine
  modified_base 3: mod_base = cm
  modified_base 4: mod_base = um
  modified_base 5: mod_base = cm
  modified_base 6: mod_base = cm
  modified_base 7: mod_base = um
  modified_base 8: mod_base = um
  modified_base 9: mod_base = OTHER; note = 2'-fluorouridine
  modified_base 10: mod_base = OTHER; note = 2'-fluorouridine
  modified_base 11: mod_base = OTHER; note = 2'-fluoroadenosine
  modified_base 12: mod_base = OTHER; note = 2'-O-methyladenosine
  modified_base 13: mod_base = gm
  modified_base 14: mod_base = gm
  modified_base 15: mod_base = OTHER; note = 2'-O-methyladenosine
  modified_base 16: mod_base = um
  modified_base 17: mod_base = OTHER; note = 2'-O-methyladenosine
  modified_base 18: mod_base = OTHER; note = 2'-O-methyladenosine
  modified_base 19: mod_base = OTHER; note = 2'-O-methyladenosine
  modified_base 20: mod_base = cm
  modified_base 21: mod_base = um
  source 1..21: mol_type = other RNA
gactccttttaaggataaact

SEQ ID NO: 522 - RNA, 21 nt, synthetic construct
  modified_base 1: mod_base = gm
  modified_base 1^2: mod_base = OTHER; note = phosphorothioate linkage
  modified_base 2: mod_base = cm
  modified_base 3: mod_base = OTHER; note = 2'-O-methyladenosine
  modified_base 4: mod_base = gm
  modified_base 5: mod_base = um
  modified_base 6: mod_base = um
  modified_base 7: mod_base = gm
  modified_base 8: mod_base = gm
  modified_base 9: mod_base = OTHER; note = 2'-fluorouridine
  modified_base 10: mod_base = um
  modified_base 11: mod_base = OTHER; note = 2'-fluorouridine
  modified_base 12: mod_base = um
  modified_base 13: mod_base = OTHER; note = 2'-fluorouridine
  modified_base 14: mod_base = gm
  modified_base 15: mod_base = OTHER; note = 2'-O-methyladenosine
  modified_base 16: mod_base = OTHER; note = 2'-O-methyladenosine
  modified_base 17: mod_base = um
  modified_base 18: mod_base = gm
  modified_base 19: mod_base = um
  modified_base 20: mod_base = cm
  modified_base 21: mod_base = um
  source 1..21: mol_type = other RNA
gcagttggtttttgaatgtct

SEQ ID NO: 523 - RNA, 21 nt, synthetic construct
  modified_base 1: mod_base = gm
  modified_base 1^2: mod_base = OTHER; note = phosphorothioate linkage
  modified_base 2: mod_base = cm
  modified_base 3: mod_base = OTHER; note = 2'-O-methyladenosine
  modified_base 4: mod_base = gm
  modified_base 5: mod_base = um
  modified_base 6: mod_base = um
  modified_base 7: mod_base = gm
  modified_base 8: mod_base = gm
  modified_base 9: mod_base = OTHER; note = 2'-fluorouridine
  modified_base 10: mod_base = OTHER; note = 2'-fluorouridine
  modified_base 11: mod_base = OTHER; note = 2'-fluorouridine
  modified_base 12: mod_base = um
  modified_base 13: mod_base = um
  modified_base 14: mod_base = gm
  modified_base 15: mod_base = OTHER; note = 2'-O-methyladenosine
  modified_base 16: mod_base = OTHER; note = 2'-O-methyladenosine
  modified_base 17: mod_base = um
  modified_base 18: mod_base = gm
  modified_base 19: mod_base = um
  modified_base 20: mod_base = cm
  modified_base 21: mod_base = um
  source 1..21: mol_type = other RNA
gcagttggtttttgaatgtct

SEQ ID NO: 524 - RNA, 21 nt, synthetic construct
  modified_base 1: mod_base = cm
  modified_base 1^2: mod_base = OTHER; note = phosphorothioate linkage
  modified_base 2: mod_base = OTHER; note = 2'-O-methyladenosine
  modified_base 3: mod_base = gm
  modified_base 4: mod_base = um
  modified_base 5: mod_base = gm
  modified_base 6: mod_base = gm
  modified_base 7: mod_base = OTHER; note = 2'-O-methyladenosine
  modified_base 8: mod_base = um
  modified_base 9: mod_base = OTHER; note = 2'-fluorocytidine
  modified_base 10: mod_base = gm
  modified_base 11: mod_base = OTHER; note = 2'-fluoroadenosine
  modified_base 12: mod_base = um
  modified_base 13: mod_base = OTHER; note = 2'-fluorouridine
  modified_base 14: mod_base = OTHER; note = 2'-O-methyladenosine
  modified_base 15: mod_base = gm
  modified_base 16: mod_base = um
  modified_base 17: mod_base = gm
  modified_base 18: mod_base = um
  modified_base 19: mod_base = cm
  modified_base 20: mod_base = OTHER; note = 2'-O-methyladenosine
  modified_base 21: mod_base = OTHER; note = 2'-O-methyladenosine
  source 1..21: mol_type = other RNA
cagtggatcgattagtgtcaa

SEQ ID NO: 525 - RNA, 21 nt, synthetic construct
  modified_base 1: mod_base = cm
  modified_base 1^2: mod_base = OTHER; note = phosphorothioate linkage
  modified_base 2: mod_base = OTHER; note = 2'-O-methyladenosine
  modified_base 3: mod_base = gm
  modified_base 4: mod_base = um
  modified_base 5: mod_base = gm
  modified_base 6: mod_base = gm
  modified_base 7: mod_base = OTHER; note = 2'-O-methyladenosine
  modified_base 8: mod_base = um
  modified_base 9: mod_base = OTHER; note = 2'-fluorocytidine
  modified_base 10: mod_base = gm
  modified_base 11: mod_base = OTHER; note = 2'-fluoroadenosine
  modified_base 12: mod_base = um
  modified_base 13: mod_base = OTHER; note = 2'-fluorouridine
  modified_base 14: mod_base = OTHER; note = 2'-O-methyladenosine
  modified_base 15: mod_base = gm
  modified_base 16: mod_base = um
  modified_base 17: mod_base = OTHER; note = 2-O-methylinosine
  modified_base 18: mod_base = um
  modified_base 19: mod_base = cm
  modified_base 20: mod_base = OTHER; note = 2'-O-methyladenosine
  modified_base 21: mod_base = OTHER; note = 2'-O-methyladenosine
  source 1..21: mol_type = other RNA
cagtggatcgattagtntcaa

SEQ ID NO: 526 - RNA, 21 nt, synthetic construct
  modified_base 1: mod_base = gm
  modified_base 1^2: mod_base = OTHER; note = phosphorothioate linkage
  modified_base 2: mod_base = cm
  modified_base 3: mod_base = OTHER; note = 2'-O-methyladenosine
  modified_base 4: mod_base = gm
  modified_base 5: mod_base = um
  modified_base 6: mod_base = um
  modified_base 7: mod_base = gm
  modified_base 8: mod_base = gm
  modified_base 9: mod_base = OTHER; note = 2'-fluorouridine
  modified_base 10: mod_base = um
  modified_base 11: mod_base = OTHER; note = 2'-fluorouridine
  modified_base 12: mod_base = um
  modified_base 13: mod_base = OTHER; note = 2'-fluorouridine
  modified_base 14: mod_base = gm
  modified_base 15: mod_base = OTHER; note = 2'-O-methyladenosine
  modified_base 16: mod_base = OTHER; note = 2'-O-methyladenosine
  modified_base 17: mod_base = um
  modified_base 18: mod_base = gm
  modified_base 19: mod_base = um
  modified_base 20: mod_base = cm
  modified_base 21: mod_base = OTHER; note = 2'-O-methyladenosine
  source 1..21: mol_type = other RNA
gcagttggtttttgaatgtca

SEQ ID NO: 527 - RNA, 21 nt, synthetic construct
  modified_base 1: mod_base = gm
  modified_base 2: mod_base = cm
  modified_base 3: mod_base = OTHER; note = 2'-O-methyladenosine
  modified_base 4: mod_base = gm
  modified_base 5: mod_base = um
  modified_base 6: mod_base = um
  modified_base 7: mod_base = gm
  modified_base 8: mod_base = gm
  modified_base 9: mod_base = OTHER; note = 2'-fluorouridine
  modified_base 10: mod_base = OTHER; note = 2'-fluorouridine
  modified_base 11: mod_base = OTHER; note = 2'-fluorouridine
  modified_base 12: mod_base = um
  modified_base 13: mod_base = um
  modified_base 14: mod_base = gm
  modified_base 15: mod_base = OTHER; note = 2'-O-methyladenosine
  modified_base 16: mod_base = OTHER; note = 2'-O-methyladenosine
  modified_base 17: mod_base = um
  modified_base 18: mod_base = gm
  modified_base 19: mod_base = um
  modified_base 20: mod_base = cm
  modified_base 21: mod_base = OTHER; note = 2'-O-methyladenosine
  source 1..21: mol_type = other RNA
gcagttggtttttgaatgtca

SEQ ID NO: 528 - RNA, 21 nt, synthetic construct
  modified_base 1: mod_base = gm
  modified_base 2: mod_base = OTHER; note = 2'-O-methyladenosine
  modified_base 3: mod_base = um
  modified_base 4: mod_base = gm
  modified_base 5: mod_base = um
  modified_base 6: mod_base = gm
  modified_base 7: mod_base = gm
  modified_base 8: mod_base = OTHER; note = 2'-O-methyladenosine
  modified_base 9: mod_base = OTHER; note = 2'-fluoroguanosine
  modified_base 10: mod_base = um
  modified_base 11: mod_base = OTHER; note = 2'-fluoroguanosine
  modified_base 12: mod_base = cm
  modified_base 13: mod_base = OTHER; note = 2'-fluorocytidine
  modified_base 14: mod_base = OTHER; note = 2'-O-methyladenosine
  modified_base 15: mod_base = gm
  modified_base 16: mod_base = OTHER; note = 2'-O-methyladenosine
  modified_base 17: mod_base = um
  modified_base 18: mod_base = gm
  modified_base 19: mod_base = um
  modified_base 20: mod_base = um
  modified_base 21: mod_base = OTHER; note = 2'-O-methyladenosine
  source 1..21: mol_type = other RNA
gatgtggagtgccagatgtta

SEQ ID NO: 529 - RNA, 21 nt, synthetic construct
  modified_base 1: mod_base = gm
  modified_base 2: mod_base = cm
  modified_base 3: mod_base = OTHER; note = 2'-O-methyladenosine
  modified_base 4: mod_base = gm
  modified_base 5: mod_base = um
  modified_base 6: mod_base = gm
  modified_base 7: mod_base = OTHER; note = 2'-O-methyladenosine
  modified_base 8: mod_base = um
  modified_base 9: mod_base = OTHER; note = 2'-fluoroguanosine
  modified_base 10: mod_base = OTHER; note = 2'-fluorouridine
  modified_base 11: mod_base = OTHER; note = 2'-fluoroadenosine
  modified_base 12: mod_base = um
  modified_base 13: mod_base = cm
  modified_base 14: mod_base = cm
  modified_base 15: mod_base = OTHER; note = 2'-O-methyladenosine
  modified_base 16: mod_base = OTHER; note = 2'-O-methyladenosine
  modified_base 17: mod_base = cm
  modified_base 18: mod_base = cm
  modified_base 19: mod_base = um
  modified_base 20: mod_base = OTHER; note = 2'-O-methyladenosine
  modified_base 21: mod_base = OTHER; note = 2'-O-methyladenosine
  source 1..21: mol_type = other RNA
gcagtgatgtatccaacctaa

SEQ ID NO: 530 - RNA, 21 nt, synthetic construct
  modified_base 1: mod_base = cm
  modified_base 2: mod_base = OTHER; note = 2'-O-methyladenosine
  modified_base 3: mod_base = cm
  modified_base 4: mod_base = um
  modified_base 5: mod_base = cm
  modified_base 6: mod_base = cm
  modified_base 7: mod_base = um
  modified_base 8: mod_base = um
  modified_base 9: mod_base = OTHER; note = 2'-fluorouridine
  modified_base 10: mod_base = OTHER; note = 2'-fluorouridine
  modified_base 11: mod_base = OTHER; note = 2'-fluoroadenosine
  modified_base 12: mod_base = OTHER; note = 2'-O-methyladenosine
  modified_base 13: mod_base = gm
  modified_base 14: mod_base = gm
  modified_base 15: mod_base = OTHER; note = 2'-O-methyladenosine
  modified_base 16: mod_base = um
  modified_base 17: mod_base = OTHER; note = 2'-O-methyladenosine
  modified_base 18: mod_base = OTHER; note = 2'-O-methyladenosine
  modified_base 19: mod_base = OTHER; note = 2'-O-methyladenosine
  modified_base 20: mod_base = cm
  modified_base 21: mod_base = OTHER; note = 2'-O-methyladenosine
  source 1..21: mol_type = other RNA
cactccttttaaggataaaca

SEQ ID NO: 531 - RNA, 21 nt, synthetic construct
  modified_base 1: mod_base = gm
  modified_base 2: mod_base = cm
  modified_base 3: mod_base = OTHER; note = 2'-O-methyladenosine
  modified_base 4: mod_base = gm
  modified_base 5: mod_base = um
  modified_base 6: mod_base = um
  modified_base 7: mod_base = gm
  modified_base 8: mod_base = gm
  modified_base 9: mod_base = OTHER; note = 2'-fluorouridine
  modified_base 10: mod_base = um
  modified_base 11: mod_base = OTHER; note = 2'-fluorouridine
  modified_base 12: mod_base = um
  modified_base 13: mod_base = OTHER; note = 2'-fluorouridine
  modified_base 14: mod_base = gm
  modified_base 15: mod_base = OTHER; note = 2'-O-methyladenosine
  modified_base 16: mod_base = OTHER; note = 2'-O-methyladenosine
  modified_base 17: mod_base = um
  modified_base 18: mod_base = gm
  modified_base 19: mod_base = um
  modified_base 20: mod_base = cm
  modified_base 21: mod_base = OTHER; note = 2'-O-methyladenosine
  source 1..21: mol_type = other RNA
gcagttggtttttgaatgtca

SEQ ID NO: 532 - RNA, 21 nt, synthetic construct
  modified_base 1: mod_base = gm
  modified_base 1^2: mod_base = OTHER; note = phosphorothioate linkage
  modified_base 2: mod_base = cm
  modified_base 3: mod_base = OTHER; note = 2'-O-methyladenosine
  modified_base 4: mod_base = gm
  modified_base 5: mod_base = um
  modified_base 6: mod_base = gm
  modified_base 7: mod_base = OTHER; note = 2'-O-methyladenosine
  modified_base 8: mod_base = um
  modified_base 9: mod_base = OTHER; note = 2'-fluoroguanosine
  modified_base 10: mod_base = um
  modified_base 11: mod_base = OTHER; note = 2'-fluoroadenosine
  modified_base 12: mod_base = um
  modified_base 13: mod_base = OTHER; note = 2'-fluorocytidine
  modified_base 14: mod_base = cm
  modified_base 15: mod_base = OTHER; note = 2'-O-methyladenosine
  modified_base 16: mod_base = OTHER; note = 2'-O-methyladenosine
  modified_base 17: mod_base = cm
  modified_base 18: mod_base = cm
  modified_base 19: mod_base = um
  modified_base 20: mod_base = OTHER; note = 2'-O-methyladenosine
  modified_base 21: mod_base = um
  source 1..21: mol_type = other RNA
gcagtgatgtatccaacctat

SEQ ID NO: 533 - RNA, 21 nt, synthetic construct
  modified_base 1: mod_base = gm
  modified_base 1^2: mod_base = OTHER; note = phosphorothioate linkage
  modified_base 2: mod_base = cm
  modified_base 2^3: mod_base = OTHER; note = phosphorothioate linkage
  modified_base 3: mod_base = OTHER; note = 2'-O-methyladenosine
  modified_base 4: mod_base = gm
  modified_base 5: mod_base = um
  modified_base 6: mod_base = um
  modified_base 7: mod_base = gm
  modified_base 8: mod_base = gm
  modified_base 9: mod_base = OTHER; note = 2'-fluorouridine
  modified_base 10: mod_base = um
  modified_base 11: mod_base = OTHER; note = 2'-fluorouridine
  modified_base 12: mod_base = um
  modified_base 13: mod_base = OTHER; note = 2'-fluorouridine
  modified_base 14: mod_base = gm
  modified_base 15: mod_base = OTHER; note = 2'-O-methyladenosine
  modified_base 16: mod_base = OTHER; note = 2'-O-methyladenosine
  modified_base 17: mod_base = um
  modified_base 18: mod_base = gm
  modified_base 19: mod_base = um
  modified_base 20: mod_base = cm
  modified_base 20^21: mod_base = OTHER; note = phosphorothioate linkage
  modified_base 21: mod_base = um
  source 1..21: mol_type = other RNA
gcagttggtttttgaatgtct

SEQ ID NO: 534 - RNA, 21 nt, synthetic construct
  modified_base 1: mod_base = gm
  modified_base 1^2: mod_base = OTHER; note = phosphorothioate linkage
  modified_base 2: mod_base = OTHER; note = 2'-fluorocytidine
  modified_base 2^3: mod_base = OTHER; note = phosphorothioate linkage
  modified_base 3: mod_base = OTHER; note = 2'-O-methyladenosine
  modified_base 3^4: mod_base = OTHER; note = phosphorothioate linkage
  modified_base 4: mod_base = gm
  modified_base 5: mod_base = um
  modified_base 6: mod_base = um
  modified_base 7: mod_base = gm
  modified_base 8: mod_base = gm
  modified_base 9: mod_base = OTHER; note = 2'-fluorouridine
  modified_base 10: mod_base = um
  modified_base 11: mod_base = um
  modified_base 12: mod_base = OTHER; note = 2'-fluorouridine
  modified_base 13: mod_base = um
  modified_base 14: mod_base = OTHER; note = 2'-fluoroguanosine
  modified_base 15: mod_base = OTHER; note = 2'-O-methyladenosine
  modified_base 16: mod_base = OTHER; note = 2'-fluoroadenosine
  modified_base 17: mod_base = um
  modified_base 18: mod_base = gm
  modified_base 19: mod_base = um
  modified_base 20: mod_base = cm
  modified_base 20^21: mod_base = OTHER; note = phosphorothioate linkage
  modified_base 21: mod_base = um
  source 1..21: mol_type = other RNA
gcagttggtttttgaatgtct

SEQ ID NO: 535 - RNA, 20 nt, synthetic construct
  modified_base 1: mod_base = gm
  modified_base 1^2: mod_base = OTHER; note = phosphorothioate linkage
  modified_base 2: mod_base = cm
  modified_base 3: mod_base = gm
  modified_base 4: mod_base = um
  modified_base 5: mod_base = um
  modified_base 6: mod_base = gm
  modified_base 7: mod_base = gm
  modified_base 8: mod_base = OTHER; note = 2'-fluorouridine
  modified_base 9: mod_base = um
  modified_base 10: mod_base = OTHER; note = 2'-fluorouridine
  modified_base 11: mod_base = um
  modified_base 12: mod_base = OTHER; note = 2'-fluorouridine
  modified_base 13: mod_base = gm
  modified_base 14: mod_base = OTHER; note = 2'-O-methyladenosine
  modified_base 15: mod_base = OTHER; note = 2'-O-methyladenosine
  modified_base 16: mod_base = um
  modified_base 17: mod_base = gm
  modified_base 18: mod_base = um
  modified_base 19: mod_base = cm
  modified_base 20: mod_base = OTHER; note = 2'-O-methyladenosine
  source 1..20: mol_type = other RNA
gcgttggtttttgaatgtca

SEQ ID NO: 536 - RNA, 22 nt, synthetic construct
  modified_base 1: mod_base = gm
  modified_base 1^2: mod_base = OTHER; note = phosphorothioate linkage
  modified_base 2: mod_base = cm
  modified_base 3: mod_base = OTHER; note = 2'-O-methyladenosine
  modified_base 4: mod_base = gm
  modified_base 5: mod_base = um
  modified_base 6: mod_base = um
  modified_base 7: mod_base = gm
  modified_base 8: mod_base = gm
  modified_base 9: mod_base = gm
  modified_base 10: mod_base = OTHER; note = 2'-fluorouridine
  modified_base 11: mod_base = um
  modified_base 12: mod_base = OTHER; note = 2'-fluorouridine
  modified_base 13: mod_base = um
  modified_base 14: mod_base = OTHER; note = 2'-fluorouridine
  modified_base 15: mod_base = gm
  modified_base 16: mod_base = OTHER; note = 2'-O-methyladenosine
  modified_base 17: mod_base = OTHER; note = 2'-O-methyladenosine
  modified_base 18: mod_base = um
  modified_base 19: mod_base = gm
  modified_base 20: mod_base = um
  modified_base 21: mod_base = cm
  modified_base 22: mod_base = OTHER; note = 2'-O-methyladenosine
  source 1..22: mol_type = other RNA
gcagttgggtttttgaatgtca

SEQ ID NO: 537 - RNA, 21 nt, synthetic construct
  modified_base 1: mod_base = gm
  modified_base 1^2: mod_base = OTHER; note = phosphorothioate linkage
  modified_base 2: mod_base = cm
  modified_base 3: mod_base = OTHER; note = 2'-O-methyladenosine
  modified_base 4: mod_base = gm
  modified_base 5: mod_base = um
  modified_base 6: mod_base = um
  modified_base 7: mod_base = gm
  modified_base 8: mod_base = gm
  modified_base 9: mod_base = OTHER; note = 2'-fluorouridine
  modified_base 10: mod_base = um
  modified_base 11: mod_base = OTHER; note = 2'-fluorouridine
  modified_base 12: mod_base = um
  modified_base 13: mod_base = OTHER; note = 2'-fluorouridine
  modified_base 14: mod_base = gm
  modified_base 15: mod_base = OTHER; note = 2'-O-methyladenosine
  modified_base 16: mod_base = OTHER; note = 2'-O-methyladenosine
  modified_base 17: mod_base = um
  modified_base 18: mod_base = gm
  modified_base 19: mod_base = um
  modified_base 20: mod_base = cm
  modified_base 21: mod_base = OTHER; note = 2'-O-methyladenosine
  source 1..21: mol_type = other RNA
gcagttggtttttgaatgtca

SEQ ID NO: 538 - RNA, 21 nt, synthetic construct
  modified_base 1: mod_base = gm
  modified_base 1^2: mod_base = OTHER; note = phosphorothioate linkage
  modified_base 2: mod_base = cm
  modified_base 3: mod_base = OTHER; note = 2'-O-methyladenosine
  modified_base 4: mod_base = gm
  modified_base 5: mod_base = um
  modified_base 6: mod_base = um
  modified_base 7: mod_base = gm
  modified_base 8: mod_base = gm
  modified_base 9: mod_base = OTHER; note = 2'-fluorouridine
  modified_base 10: mod_base = um
  modified_base 11: mod_base = OTHER; note = 2'-fluorouridine
  modified_base 12: mod_base = um
  modified_base 13: mod_base = OTHER; note = 2'-fluorouridine
  modified_base 14: mod_base = gm
  modified_base 15: mod_base = OTHER; note = 2'-O-methyladenosine
  modified_base 16: mod_base = OTHER; note = 2'-O-methyladenosine
  modified_base 17: mod_base = um
  modified_base 18: mod_base = gm
  modified_base 19: mod_base = um
  modified_base 20: mod_base = cm
  modified_base 21: mod_base = OTHER; note = 2'-O-methyladenosine
  source 1..21: mol_type = other RNA
gcagttggtttttgaatgtca

SEQ ID NO: 539 - RNA, 21 nt, synthetic construct
  modified_base 1: mod_base = OTHER; note = 2'-O-methyladenosine
  modified_base 1^2: mod_base = OTHER; note = phosphorothioate linkage
  modified_base 2: mod_base = gm
  modified_base 3: mod_base = OTHER; note = 2'-O-methyladenosine
  modified_base 4: mod_base = um
  modified_base 5: mod_base = gm
  modified_base 6: mod_base = um
  modified_base 7: mod_base = gm
  modified_base 8: mod_base = gm
  modified_base 9: mod_base = OTHER; note = 2'-fluoroadenosine
  modified_base 10: mod_base = OTHER; note = 2'-fluoroguanosine
  modified_base 11: mod_base = OTHER; note = 2'-fluorouridine
  modified_base 12: mod_base = gm
  modified_base 13: mod_base = cm
  modified_base 14: mod_base = cm
  modified_base 15: mod_base = OTHER; note = 2'-O-methyladenosine
  modified_base 16: mod_base = gm
  modified_base 17: mod_base = OTHER; note = 2'-O-methyladenosine
  modified_base 18: mod_base = um
  modified_base 19: mod_base = gm
  modified_base 20: mod_base = um
  modified_base 21: mod_base = um
  source 1..21: mol_type = other RNA
agatgtggagtgccagatgtt

SEQ ID NO: 540 - RNA, 21 nt, synthetic construct
  modified_base 1: mod_base = cm
  modified_base 1^2: mod_base = OTHER; note = phosphorothioate linkage
  modified_base 2: mod_base = gm
  modified_base 3: mod_base = OTHER; note = 2'-O-methyladenosine
  modified_base 4: mod_base = um
  modified_base 5: mod_base = gm
  modified_base 6: mod_base = um
  modified_base 7: mod_base = gm
  modified_base 8: mod_base = gm
  modified_base 9: mod_base = OTHER; note = 2'-fluoroadenosine
  modified_base 10: mod_base = OTHER; note = 2'-fluoroguanosine
  modified_base 11: mod_base = OTHER; note = 2'-fluorouridine
  modified_base 12: mod_base = gm
  modified_base 13: mod_base = cm
  modified_base 14: mod_base = cm
  modified_base 15: mod_base = OTHER; note = 2'-O-methyladenosine
  modified_base 16: mod_base = gm
  modified_base 17: mod_base = OTHER; note = 2'-O-methyladenosine
  modified_base 18: mod_base = um
  modified_base 19: mod_base = gm
  modified_base 20: mod_base = um
  modified_base 21: mod_base = um
  source 1..21: mol_type = other RNA
cgatgtggagtgccagatgtt

SEQ ID NO: 541 - RNA, 21 nt, synthetic construct
  modified_base 1: mod_base = OTHER; note = 2'-O-methyladenosine
  modified_base 1^2: mod_base = OTHER; note = phosphorothioate linkage
  modified_base 2: mod_base = um
  modified_base 3: mod_base = gm
  modified_base 4: mod_base = um
  modified_base 5: mod_base = gm
  modified_base 6: mod_base = gm
  modified_base 7: mod_base = OTHER; note = 2'-O-methyladenosine
  modified_base 8: mod_base = gm
  modified_base 9: mod_base = OTHER; note = 2'-fluorouridine
  modified_base 10: mod_base = OTHER; note = 2'-fluoroguanosine
  modified_base 11: mod_base = OTHER; note = 2'-fluorocytidine
  modified_base 12: mod_base = cm
  modified_base 13: mod_base = OTHER; note = 2'-O-methyladenosine
  modified_base 14: mod_base = gm
  modified_base 15: mod_base = OTHER; note = 2'-O-methyladenosine
  modified_base 16: mod_base = um
  modified_base 17: mod_base = gm
  modified_base 18: mod_base = um
  modified_base 19: mod_base = um
  modified_base 20: mod_base = gm
  modified_base 21: mod_base = OTHER; note = 2'-O-methyladenosine
  source 1..21: mol_type = other RNA
atgtggagtgccagatgttga

SEQ ID NO: 542 - RNA, 21 nt, synthetic construct
  modified_base 1: mod_base = cm
  modified_base 1^2: mod_base = OTHER; note = phosphorothioate linkage
  modified_base 2: mod_base = um
  modified_base 3: mod_base = gm
  modified_base 4: mod_base = um
  modified_base 5: mod_base = gm
  modified_base 6: mod_base = gm
  modified_base 7: mod_base = OTHER; note = 2'-O-methyladenosine
  modified_base 8: mod_base = gm
  modified_base 9: mod_base = OTHER; note = 2'-fluorouridine
  modified_base 10: mod_base = OTHER; note = 2'-fluoroguanosine
  modified_base 11: mod_base = OTHER; note = 2'-fluorocytidine
  modified_base 12: mod_base = cm
  modified_base 13: mod_base = OTHER; note = 2'-O-methyladenosine
  modified_base 14: mod_base = gm
  modified_base 15: mod_base = OTHER; note = 2'-O-methyladenosine
  modified_base 16: mod_base = um
  modified_base 17: mod_base = gm
  modified_base 18: mod_base = um
  modified_base 19: mod_base = um
  modified_base 20: mod_base = gm
  modified_base 21: mod_base = OTHER; note = 2'-O-methyladenosine
  source 1..21: mol_type = other RNA
ctgtggagtgccagatgttga

SEQ ID NO: 543 - RNA, 21 nt, synthetic construct
  modified_base 1: mod_base = um
  modified_base 1^2: mod_base = OTHER; note = phosphorothioate linkage
  modified_base 2: mod_base = gm
  modified_base 3: mod_base = um
  modified_base 4: mod_base = gm
  modified_base 5: mod_base = gm
  modified_base 6: mod_base = OTHER; note = 2'-O-methyladenosine
  modified_base 7: mod_base = gm
  modified_base 8: mod_base = um
  modified_base 9: mod_base = OTHER; note = 2'-fluoroguanosine
  modified_base 10: mod_base = OTHER; note = 2'-fluorocytidine
  modified_base 11: mod_base = OTHER; note = 2'-fluorocytidine
  modified_base 12: mod_base = OTHER; note = 2'-O-methyladenosine
  modified_base 13: mod_base = gm
  modified_base 14: mod_base = OTHER; note = 2'-O-methyladenosine
  modified_base 15: mod_base = um
  modified_base 16: mod_base = gm
  modified_base 17: mod_base = um
  modified_base 18: mod_base = um
  modified_base 19: mod_base = gm
  modified_base 20: mod_base = cm
  modified_base 21: mod_base = OTHER; note = 2'-O-methyladenosine
  source 1..21: mol_type = other RNA
tgtggagtgccagatgttgca

SEQ ID NO: 544 - RNA, 21 nt, synthetic construct
  modified_base 1: mod_base = cm
  modified_base 1^2: mod_base = OTHER; note = phosphorothioate linkage
  modified_base 2: mod_base = gm
  modified_base 3: mod_base = um
  modified_base 4: mod_base = gm
  modified_base 5: mod_base = gm
  modified_base 6: mod_base = OTHER; note = 2'-O-methyladenosine
  modified_base 7: mod_base = gm
  modified_base 8: mod_base = um
  modified_base 9: mod_base = OTHER; note = 2'-fluoroguanosine
  modified_base 10: mod_base = OTHER; note = 2'-fluorocytidine
  modified_base 11: mod_base = OTHER; note = 2'-fluorocytidine
  modified_base 12: mod_base = OTHER; note = 2'-O-methyladenosine
  modified_base 13: mod_base = gm
  modified_base 14: mod_base = OTHER; note = 2'-O-methyladenosine
  modified_base 15: mod_base = um
  modified_base 16: mod_base = gm
  modified_base 17: mod_base = um
  modified_base 18: mod_base = um
  modified_base 19: mod_base = gm
  modified_base 20: mod_base = cm
  modified_base 21: mod_base = OTHER; note = 2'-O-methyladenosine
  source 1..21: mol_type = other RNA
cgtggagtgccagatgttgca

SEQ ID NO: 545 - RNA, 21 nt, synthetic construct
  modified_base 1: mod_base = um
  modified_base 1^2: mod_base = OTHER; note = phosphorothioate linkage
  modified_base 2: mod_base = gm
  modified_base 3: mod_base = gm
  modified_base 4: mod_base = OTHER; note = 2'-O-methyladenosine
  modified_base 5: mod_base = gm
  modified_base 6: mod_base = um
  modified_base 7: mod_base = gm
  modified_base 8: mod_base = cm
  modified_base 9: mod_base = OTHER; note = 2'-fluorocytidine
  modified_base 10: mod_base = OTHER; note = 2'-fluoroadenosine
  modified_base 11: mod_base = OTHER; note = 2'-fluoroguanosine
  modified_base 12: mod_base = OTHER; note = 2'-O-methyladenosine
  modified_base 13: mod_base = um
  modified_base 14: mod_base = gm
  modified_base 15: mod_base = um
  modified_base 16: mod_base = um
  modified_base 17: mod_base = gm
  modified_base 18: mod_base = cm
  modified_base 19: mod_base = OTHER; note = 2'-O-methyladenosine
  modified_base 20: mod_base = gm
  modified_base 21: mod_base = OTHER; note = 2'-O-methyladenosine
  source 1..21: mol_type = other RNA
tggagtgccagatgttgcaga

SEQ ID NO: 546 - RNA, 21 nt, synthetic construct
  modified_base 1: mod_base = cm
  modified_base 1^2: mod_base = OTHER; note = phosphorothioate linkage
  modified_base 2: mod_base = gm
  modified_base 3: mod_base = gm
  modified_base 4: mod_base = OTHER; note = 2'-O-methyladenosine
  modified_base 5: mod_base = gm
  modified_base 6: mod_base = um
  modified_base 7: mod_base = gm
  modified_base 8: mod_base = cm
  modified_base 9: mod_base = OTHER; note = 2'-fluorocytidine
  modified_base 10: mod_base = OTHER; note = 2'-fluoroadenosine
  modified_base 11: mod_base = OTHER; note = 2'-fluoroguanosine
  modified_base 12: mod_base = OTHER; note = 2'-O-methyladenosine
  modified_base 13: mod_base = um
  modified_base 14: mod_base = gm
  modified_base 15: mod_base = um
  modified_base 16: mod_base = um
  modified_base 17: mod_base = gm
  modified_base 18: mod_base = cm
  modified_base 19: mod_base = OTHER; note = 2'-O-methyladenosine
  modified_base 20: mod_base = gm
  modified_base 21: mod_base = OTHER; note = 2'-O-methyladenosine
  source 1..21: mol_type = other RNA
cggagtgccagatgttgcaga

SEQ ID NO: 547 - RNA, 21 nt, synthetic construct
  modified_base 1: mod_base = gm
  modified_base 1^2: mod_base = OTHER; note = phosphorothioate linkage
  modified_base 2: mod_base = gm
  modified_base 3: mod_base = OTHER; note = 2'-O-methyladenosine
  modified_base 4: mod_base = gm
  modified_base 5: mod_base = um
  modified_base 6: mod_base = gm
  modified_base 7: mod_base = cm
  modified_base 8: mod_base = cm
  modified_base 9: mod_base = OTHER; note = 2'-fluoroadenosine
  modified_base 10: mod_base = OTHER; note = 2'-fluoroguanosine
  modified_base 11: mod_base = OTHER; note = 2'-fluoroadenosine
  modified_base 12: mod_base = um
  modified_base 13: mod_base = gm
  modified_base 14: mod_base = um
  modified_base 15: mod_base = um
  modified_base 16: mod_base = gm
  modified_base 17: mod_base = cm
  modified_base 18: mod_base = OTHER; note = 2'-O-methyladenosine
  modified_base 19: mod_base = gm
  modified_base 20: mod_base = OTHER; note = 2'-O-methyladenosine
  modified_base 21: mod_base = OTHER; note = 2'-O-methyladenosine
  source 1..21: mol_type = other RNA
ggagtgccagatgttgcagaa

SEQ ID NO: 548 - RNA, 21 nt, synthetic construct
  modified_base 1: mod_base = gm
  modified_base 1^2: mod_base = OTHER; note = phosphorothioate linkage
  modified_base 2: mod_base = OTHER; note = 2'-O-methyladenosine
  modified_base 3: mod_base = gm
  modified_base 4: mod_base = um
  modified_base 5: mod_base = gm
  modified_base 6: mod_base = cm
  modified_base 7: mod_base = cm
  modified_base 8: mod_base = OTHER; note = 2'-O-methyladenosine
  modified_base 9: mod_base = OTHER; note = 2'-fluoroguanosine
  modified_base 10: mod_base = OTHER; note = 2'-fluoroadenosine
  modified_base 11: mod_base = OTHER; note = 2'-fluorouridine
  modified_base 12: mod_base = gm
  modified_base 13: mod_base = um
  modified_base 14: mod_base = um
  modified_base 15: mod_base = gm
  modified_base 16: mod_base = cm
  modified_base 17: mod_base = OTHER; note = 2'-O-methyladenosine
  modified_base 18: mod_base = gm
  modified_base 19: mod_base = OTHER; note = 2'-O-methyladenosine
  modified_base 20: mod_base = OTHER; note = 2'-O-methyladenosine
  modified_base 21: mod_base = um
  source 1..21: mol_type = other RNA
gagtgccagatgttgcagaat

SEQ ID NO: 549 - RNA, 21 nt, synthetic construct
  modified_base 1: mod_base = OTHER; note = 2'-O-methyladenosine
  modified_base 1^2: mod_base = OTHER; note = phosphorothioate linkage
  modified_base 2: mod_base = gm
  modified_base 3: mod_base = um
  modified_base 4: mod_base = gm
  modified_base 5: mod_base = cm
  modified_base 6: mod_base = cm
  modified_base 7: mod_base = OTHER; note = 2'-O-methyladenosine
  modified_base 8: mod_base = gm
  modified_base 9: mod_base = OTHER; note = 2'-fluoroadenosine
  modified_base 10: mod_base = OTHER; note = 2'-fluorouridine
  modified_base 11: mod_base = OTHER; note = 2'-fluoroguanosine
  modified_base 12: mod_base = um
  modified_base 13: mod_base = um
  modified_base 14: mod_base = gm
  modified_base 15: mod_base = cm
  modified_base 16: mod_base = OTHER; note = 2'-O-methyladenosine
  modified_base 17: mod_base = gm
  modified_base 18: mod_base = OTHER; note = 2'-O-methyladenosine
  modified_base 19: mod_base = OTHER; note = 2'-O-methyladenosine
  modified_base 20: mod_base = um
  modified_base 21: mod_base = OTHER; note = 2'-O-methyladenosine
  source 1..21: mol_type = other RNA
agtgccagatgttgcagaata

SEQ ID NO: 550 - RNA, 21 nt, synthetic construct
  modified_base 1: mod_base = cm
  modified_base 1^2: mod_base = OTHER; note = phosphorothioate linkage
  modified_base 2: mod_base = gm
  modified_base 3: mod_base = um
  modified_base 4: mod_base = gm
  modified_base 5: mod_base = cm
  modified_base 6: mod_base = cm
  modified_base 7: mod_base = OTHER; note = 2'-O-methyladenosine
  modified_base 8: mod_base = gm
  modified_base 9: mod_base = OTHER; note = 2'-fluoroadenosine
  modified_base 10: mod_base = OTHER; note = 2'-fluorouridine
  modified_base 11: mod_base = OTHER; note = 2'-fluoroguanosine
  modified_base 12: mod_base = um
  modified_base 13: mod_base = um
  modified_base 14: mod_base = gm
  modified_base 15: mod_base = cm
  modified_base 16: mod_base = OTHER; note = 2'-O-methyladenosine
  modified_base 17: mod_base = gm
  modified_base 18: mod_base = OTHER; note = 2'-O-methyladenosine
  modified_base 19: mod_base = OTHER; note = 2'-O-methyladenosine
  modified_base 20: mod_base = um
  modified_base 21: mod_base = OTHER; note = 2'-O-methyladenosine
  source 1..21: mol_type = other RNA
cgtgccagatgttgcagaata

SEQ ID NO: 551 - RNA, 21 nt, synthetic construct
  modified_base 1: mod_base = cm
  modified_base 1^2: mod_base = OTHER; note = phosphorothioate linkage
  modified_base 2: mod_base = cm
  modified_base 3: mod_base = cm
  modified_base 4: mod_base = OTHER; note = 2'-O-methyladenosine
  modified_base 5: mod_base = um
  modified_base 6: mod_base = um
  modified_base 7: mod_base = um
  modified_base 8: mod_base = gm
  modified_base 9: mod_base = OTHER; note = 2'-fluoroadenosine
  modified_base 10: mod_base = OTHER; note = 2'-fluorouridine
  modified_base 11: mod_base = OTHER; note = 2'-fluoroguanosine
  modified_base 12: mod_base = gm
  modified_base 13: mod_base = gm
  modified_base 14: mod_base = cm
  modified_base 15: mod_base = cm
  modified_base 16: mod_base = OTHER; note = 2'-O-methyladenosine
  modified_base 17: mod_base = gm
  modified_base 18: mod_base = gm
  modified_base 19: mod_base = OTHER; note = 2'-O-methyladenosine
  modified_base 20: mod_base = OTHER; note = 2'-O-methyladenosine
  modified_base 21: mod_base = OTHER; note = 2'-O-methyladenosine
  source 1..21: mol_type = other RNA
cccatttgatgggccaggaaa

SEQ ID NO: 552 - RNA, 21 nt, synthetic construct
  modified_base 1: mod_base = cm
  modified_base 1^2: mod_base = OTHER; note = phosphorothioate linkage
  modified_base 2: mod_base = um
  modified_base 3: mod_base = um
  modified_base 4: mod_base = gm
  modified_base 5: mod_base = OTHER; note = 2'-O-methyladenosine
  modified_base 6: mod_base = um
  modified_base 7: mod_base = gm
  modified_base 8: mod_base = gm
  modified_base 9: mod_base = OTHER; note = 2'-fluoroguanosine
  modified_base 10: mod_base = OTHER; note = 2'-fluorocytidine
  modified_base 11: mod_base = OTHER; note = 2'-fluorocytidine
  modified_base 12: mod_base = OTHER; note = 2'-O-methyladenosine
  modified_base 13: mod_base = gm
  modified_base 14: mod_base = gm
  modified_base 15: mod_base = OTHER; note = 2'-O-methyladenosine
  modified_base 16: mod_base = OTHER; note = 2'-O-methyladenosine
  modified_base 17: mod_base = OTHER; note = 2'-O-methyladenosine
  modified_base 18: mod_base = cm
  modified_base 19: mod_base = OTHER; note = 2'-O-methyladenosine
  modified_base 20: mod_base = cm
  modified_base 21: mod_base = OTHER; note = 2'-O-methyladenosine
  source 1..21: mol_type = other RNA
cttgatgggccaggaaacaca

SEQ ID NO: 553 - RNA, 21 nt, synthetic construct
  modified_base 1: mod_base = cm
  modified_base 2: mod_base = OTHER; note = 2'-O-methyladenosine
  modified_base 3: mod_base = gm
  modified_base 4: mod_base = gm
  modified_base 5: mod_base = cm
  modified_base 6: mod_base = um
  modified_base 7: mod_base = cm
  modified_base 8: mod_base = OTHER; note = 2'-O-methyladenosine
  modified_base 9: mod_base = OTHER; note = 2'-fluoroguanosine
  modified_base 10: mod_base = OTHER; note = 2'-fluoroguanosine
  modified_base 11: mod_base = OTHER; note = 2'-fluoroadenosine
  modified_base 12: mod_base = cm
  modified_base 13: mod_base = um
  modified_base 14: mod_base = OTHER; note = 2'-O-methyladenosine
  modified_base 15: mod_base = um
  modified_base 16: mod_base = cm
  modified_base 17: mod_base = um
  modified_base 18: mod_base = cm
  modified_base 19: mod_base = OTHER; note = 2'-O-methyladenosine
  modified_base 20: mod_base = OTHER; note = 2'-O-methyladenosine
  modified_base 21: mod_base = OTHER; note = 2'-O-methyladenosine
  source 1..21: mol_type = other RNA
caggctcaggactatctcaaa

SEQ ID NO: 554 - RNA, 21 nt, synthetic construct
  modified_base 1: mod_base = gm
  modified_base 2: mod_base = um
  modified_base 3: mod_base = cm
  modified_base 4: mod_base = um
  modified_base 5: mod_base = cm
  modified_base 6: mod_base = OTHER; note = 2'-O-methyladenosine
  modified_base 7: mod_base = OTHER; note = 2'-O-methyladenosine
  modified_base 8: mod_base = gm
  modified_base 9: mod_base = OTHER; note = 2'-fluoroadenosine
  modified_base 10: mod_base = OTHER; note = 2'-fluoroguanosine
  modified_base 11: mod_base = OTHER; note = 2'-fluoroadenosine
  modified_base 12: mod_base = um
  modified_base 13: mod_base = um
  modified_base 14: mod_base = um
  modified_base 15: mod_base = um
  modified_base 16: mod_base = OTHER; note = 2'-O-methyladenosine
  modified_base 17: mod_base = um
  modified_base 18: mod_base = cm
  modified_base 19: mod_base = um
  modified_base 20: mod_base = cm
  modified_base 21: mod_base = um
  source 1..21: mol_type = other RNA
gtctcaagagattttatctct

SEQ ID NO: 555 - RNA, 21 nt, synthetic construct
  modified_base 1: mod_base = cm
  modified_base 2: mod_base = OTHER; note = 2-aminoadenosine
  modified_base 3: mod_base = OTHER; note = 2'-O-methyladenosine
  modified_base 4: mod_base = gm
  modified_base 5: mod_base = OTHER; note = 2'-O-methyladenosine
  modified_base 6: mod_base = gm
  modified_base 7: mod_base = OTHER; note = 2'-O-methyladenosine
  modified_base 8: mod_base = um
  modified_base 9: mod_base = OTHER; note = 2'-fluorouridine
  modified_base 10: mod_base = OTHER; note = 2'-fluorouridine
  modified_base 11: mod_base = OTHER; note = 2'-fluorouridine
  modified_base 12: mod_base = OTHER; note = 2'-O-methyladenosine
  modified_base 13: mod_base = um
  modified_base 14: mod_base = cm
  modified_base 15: mod_base = um
  modified_base 16: mod_base = cm
  modified_base 17: mod_base = um
  modified_base 18: mod_base = OTHER; note = 2'-O-methyladenosine
  modified_base 19: mod_base = um
  modified_base 20: mod_base = gm
  modified_base 21: mod_base = OTHER; note = 2'-O-methyladenosine
  source 1..21: mol_type = other RNA
caagagattttatctctatga

SEQ ID NO: 556 - RNA, 21 nt, synthetic construct
  modified_base 1: mod_base = gm
  modified_base 2: mod_base = OTHER; note = 2'-O-methyladenosine
  modified_base 3: mod_base = gm
  modified_base 4: mod_base = OTHER; note = 2'-O-methyladenosine
  modified_base 5: mod_base = um
  modified_base 6: mod_base = um
  modified_base 7: mod_base = um
  modified_base 8: mod_base = um
  modified_base 9: mod_base = OTHER; note = 2'-fluoroadenosine
  modified_base 10: mod_base = OTHER; note = 2'-fluorouridine
  modified_base 11: mod_base = OTHER; note = 2'-fluorocytidine
  modified_base 12: mod_base = um
  modified_base 13: mod_base = cm
  modified_base 14: mod_base = um
  modified_base 15: mod_base = OTHER; note = 2'-O-methyladenosine
  modified_base 16: mod_base = um
  modified_base 17: mod_base = gm
  modified_base 18: mod_base = OTHER; note = 2'-O-methyladenosine
  modified_base 19: mod_base = cm
  modified_base 20: mod_base = um
  modified_base 21: mod_base = OTHER; note = 2'-O-methyladenosine
  source 1..21: mol_type = other RNA
gagattttatctctatgacta

SEQ ID NO: 557 - RNA, 21 nt, synthetic construct
  modified_base 1: mod_base = gm
  modified_base 2: mod_base = OTHER; note = 2'-O-methyladenosine
  modified_base 3: mod_base = um
  modified_base 4: mod_base = gm
  modified_base 5: mod_base = um
  modified_base 6: mod_base = gm
  modified_base 7: mod_base = gm
  modified_base 8: mod_base = OTHER; note = 2'-O-methyladenosine
  modified_base 9: mod_base = OTHER; note = 2'-fluoroguanosine
  modified_base 10: mod_base = OTHER; note = 2'-fluorouridine
  modified_base 11: mod_base = OTHER; note = 2'-fluoroguanosine
  modified_base 12: mod_base = cm
  modified_base 13: mod_base = cm
  modified_base 14: mod_base = OTHER; note = 2'-O-methyladenosine
  modified_base 15: mod_base = gm
  modified_base 16: mod_base = OTHER; note = 2'-O-methyladenosine
  modified_base 17: mod_base = um
  modified_base 18: mod_base = gm
  modified_base 19: mod_base = um
  modified_base 20: mod_base = um
  modified_base 21: mod_base = OTHER; note = 2'-O-methyladenosine
  source 1..21: mol_type = other RNA
gatgtggagtgccagatgtta

SEQ ID NO: 558 - RNA, 21 nt, synthetic construct
  modified_base 1: mod_base = gm
  modified_base 2: mod_base = gm
  modified_base 3: mod_base = OTHER; note = 2'-O-methyladenosine
  modified_base 4: mod_base = gm
  modified_base 5: mod_base = um
  modified_base 6: mod_base = gm
  modified_base 7: mod_base = cm
  modified_base 8: mod_base = cm
  modified_base 9: mod_base = OTHER; note = 2'-fluoroadenosine
  modified_base 10: mod_base = OTHER; note = 2'-fluoroguanosine
  modified_base 11: mod_base = OTHER; note = 2'-fluoroadenosine
  modified_base 12: mod_base = um
  modified_base 13: mod_base = gm
  modified_base 14: mod_base = um
  modified_base 15: mod_base = um
  modified_base 16: mod_base = OTHER; note = 2-O-methylinosine
  modified_base 17: mod_base = cm
  modified_base 18: mod_base = OTHER; note = 2'-O-methyladenosine
  modified_base 19: mod_base = gm
  modified_base 20: mod_base = OTHER; note = 2'-O-methyladenosine
  modified_base 21: mod_base = OTHER; note = 2'-O-methyladenosine
  source 1..21: mol_type = other RNA
ggagtgccagatgttncagaa

SEQ ID NO: 559 - RNA, 21 nt, synthetic construct
  modified_base 1: mod_base = gm
  modified_base 2: mod_base = cm
  modified_base 3: mod_base = cm
  modified_base 4: mod_base = OTHER; note = 2'-O-methyladenosine
  modified_base 5: mod_base = gm
  modified_base 6: mod_base = OTHER; note = 2'-O-methyladenosine
  modified_base 7: mod_base = um
  modified_base 8: mod_base = gm
  modified_base 9: mod_base = OTHER; note = 2'-fluorouridine
  modified_base 10: mod_base = OTHER; note = 2'-fluorouridine
  modified_base 11: mod_base = OTHER; note = 2'-fluoroguanosine
  modified_base 12: mod_base = cm
  modified_base 13: mod_base = OTHER; note = 2'-O-methyladenosine
  modified_base 14: mod_base = gm
  modified_base 15: mod_base = OTHER; note = 2'-O-methyladenosine
  modified_base 16: mod_base = OTHER; note = 2'-O-methyladenosine
  modified_base 17: mod_base = um
  modified_base 18: mod_base = OTHER; note = 2'-O-methyladenosine
  modified_base 19: mod_base = cm
  modified_base 20: mod_base = um
  modified_base 21: mod_base = OTHER; note = 2'-O-methyladenosine
  source 1..21: mol_type = other RNA
gccagatgttgcagaatacta

SEQ ID NO: 560 - RNA, 21 nt, synthetic construct
  modified_base 1: mod_base = gm
  modified_base 2: mod_base = gm
  modified_base 3: mod_base = um
  modified_base 4: mod_base = um
  modified_base 5: mod_base = gm
  modified_base 6: mod_base = cm
  modified_base 7: mod_base = OTHER; note = 2'-O-methyladenosine
  modified_base 8: mod_base = gm
  modified_base 9: mod_base = OTHER; note = 2'-fluoroadenosine
  modified_base 10: mod_base = OTHER; note = 2'-fluoroadenosine
  modified_base 11: mod_base = OTHER; note = 2'-fluorouridine
  modified_base 12: mod_base = OTHER; note = 2'-O-methyladenosine
  modified_base 13: mod_base = cm
  modified_base 14: mod_base = um
  modified_base 15: mod_base = cm
  modified_base 16: mod_base = OTHER; note = 2'-O-methyladenosine
  modified_base 17: mod_base = cm
  modified_base 18: mod_base = um
  modified_base 19: mod_base = OTHER; note = 2'-O-methyladenosine
  modified_base 20: mod_base = um
  modified_base 21: mod_base = um
  source 1..21: mol_type = other RNA
ggttgcagaatactcactatt

SEQ ID NO: 561 - RNA, 21 nt, synthetic construct
  modified_base 1: mod_base = gm
  modified_base 2: mod_base = um
  modified_base 3: mod_base = um
  modified_base 4: mod_base = gm
  modified_base 5: mod_base = cm
  modified_base 6: mod_base = OTHER; note = 2'-O-methyladenosine
  modified_base 7: mod_base = gm
  modified_base 8: mod_base = OTHER; note = 2'-O-methyladenosine
  modified_base 9: mod_base = OTHER; note = 2'-fluoroadenosine
  modified_base 10: mod_base = OTHER; note = 2'-fluorouridine
  modified_base 11: mod_base = OTHER; note = 2'-fluoroadenosine
  modified_base 12: mod_base = cm
  modified_base 13: mod_base = um
  modified_base 14: mod_base = cm
  modified_base 15: mod_base = OTHER; note = 2'-O-methyladenosine
  modified_base 16: mod_base = cm
  modified_base 17: mod_base = um
  modified_base 18: mod_base = OTHER; note = 2'-O-methyladenosine
  modified_base 19: mod_base = um
  modified_base 20: mod_base = um
  modified_base 21: mod_base = um
  source 1..21: mol_type = other RNA
gttgcagaatactcactattt

SEQ ID NO: 562 - RNA, 21 nt, synthetic construct
  modified_base 1: mod_base = gm
  modified_base 2: mod_base = um
  modified_base 3: mod_base = um
  modified_base 4: mod_base = OTHER; note = 2'-O-methyladenosine
  modified_base 5: mod_base = cm
  modified_base 6: mod_base = OTHER; note = 2'-O-methyladenosine
  modified_base 7: mod_base = gm
  modified_base 8: mod_base = um
  modified_base 9: mod_base = OTHER; note = 2'-fluoroguanosine
  modified_base 10: mod_base = OTHER; note = 2'-fluoroguanosine
  modified_base 11: mod_base = OTHER; note = 2'-fluoroadenosine
  modified_base 12: mod_base = um
  modified_base 13: mod_base = cm
  modified_base 14: mod_base = gm
  modified_base 15: mod_base = OTHER; note = 2'-O-methyladenosine
  modified_base 16: mod_base = um
  modified_base 17: mod_base = um
  modified_base 18: mod_base = OTHER; note = 2'-O-methyladenosine
  modified_base 19: mod_base = gm
  modified_base 20: mod_base = um
  modified_base 21: mod_base = OTHER; note = 2'-O-methyladenosine
  source 1..21: mol_type = other RNA
gttacagtggatcgattagta

SEQ ID NO: 563 - RNA, 21 nt, synthetic construct
  modified_base 1: mod_base = gm
  modified_base 2: mod_base = um
  modified_base 3: mod_base = OTHER; note = 2'-O-methyladenosine
  modified_base 4: mod_base = cm
  modified_base 5: mod_base = OTHER; note = 2'-O-methyladenosine
  modified_base 6: mod_base = gm
  modified_base 7: mod_base = um
  modified_base 8: mod_base = gm
  modified_base 9: mod_base = OTHER; note = 2'-fluoroguanosine
  modified_base 10: mod_base = OTHER; note = 2'-fluoroadenosine
  modified_base 11: mod_base = OTHER; note = 2'-fluorouridine
  modified_base 12: mod_base = cm
  modified_base 13: mod_base = gm
  modified_base 14: mod_base = OTHER; note = 2'-O-methyladenosine
  modified_base 15: mod_base = um
  modified_base 16: mod_base = um
  modified_base 17: mod_base = OTHER; note = 2'-O-methyladenosine
  modified_base 18: mod_base = OTHER; note = 2-O-methylinosine
  modified_base 19: mod_base = um
  modified_base 20: mod_base = gm
  modified_base 21: mod_base = um
  source 1..21: mol_type = other RNA
gtacagtggatcgattantgt

SEQ ID NO: 564 - RNA, 21 nt, synthetic construct
  modified_base 1: mod_base = cm
  modified_base 2: mod_base = OTHER; note = 2'-O-methyladenosine
  modified_base 3: mod_base = gm
  modified_base 4: mod_base = um
  modified_base 5: mod_base = gm
  modified_base 6: mod_base = gm
  modified_base 7: mod_base = OTHER; note = 2'-O-methyladenosine
  modified_base 8: mod_base = um
  modified_base 9: mod_base = OTHER; note = 2'-fluorocytidine
  modified_base 10: mod_base = OTHER; note = 2'-fluoroguanosine
  modified_base 11: mod_base = OTHER; note = 2'-fluoroadenosine
  modified_base 12: mod_base = um
  modified_base 13: mod_base = um
  modified_base 14: mod_base = OTHER; note = 2'-O-methyladenosine
  modified_base 15: mod_base = gm
  modified_base 16: mod_base = um
  modified_base 17: mod_base = OTHER; note = 2-O-methylinosine
  modified_base 18: mod_base = um
  modified_base 19: mod_base = cm
  modified_base 20: mod_base = OTHER; note = 2'-O-methyladenosine
  modified_base 21: mod_base = OTHER; note = 2'-O-methyladenosine
  source 1..21: mol_type = other RNA
cagtggatcgattagtntcaa

SEQ ID NO: 565 - RNA, 21 nt, synthetic construct
  modified_base 1: mod_base = OTHER; note = 2'-O-methyladenosine
  modified_base 2: mod_base = gm
  modified_base 3: mod_base = gm
  modified_base 4: mod_base = OTHER; note = 2'-O-methyladenosine
  modified_base 5: mod_base = gm
  modified_base 6: mod_base = OTHER; note = 2'-O-methyladenosine
  modified_base 7: mod_base = um
  modified_base 8: mod_base = gm
  modified_base 9: mod_base = OTHER; note = 2'-fluorocytidine
  modified_base 10: mod_base = OTHER; note = 2'-fluorouridine
  modified_base 11: mod_base = OTHER; note = 2'-fluorocytidine
  modified_base 12: mod_base = OTHER; note = 2'-O-methyladenosine
  modified_base 13: mod_base = cm
  modified_base 14: mod_base = um
  modified_base 15: mod_base = um
  modified_base 16: mod_base = cm
  modified_base 17: mod_base = OTHER; note = 2-O-methylinosine
  modified_base 18: mod_base = OTHER; note = 2'-O-methyladenosine
  modified_base 19: mod_base = um
  modified_base 20: mod_base = gm
  modified_base 21: mod_base = OTHER; note = 2'-O-methyladenosine
  source 1..21: mol_type = other RNA
aggagatgctcacttcnatga

SEQ ID NO: 566 - RNA, 21 nt, synthetic construct
  modified_base 1: mod_base = gm
  modified_base 2: mod_base = gm
  modified_base 3: mod_base = OTHER; note = 2'-O-methyladenosine
  modified_base 4: mod_base = um
  modified_base 5: mod_base = um
  modified_base 6: mod_base = OTHER; note = 2'-O-methyladenosine
  modified_base 7: mod_base = OTHER; note = 2'-O-methyladenosine
  modified_base 8: mod_base = cm
  modified_base 9: mod_base = OTHER; note = 2'-fluorouridine
  modified_base 10: mod_base = OTHER; note = 2'-fluorouridine
  modified_base 11: mod_base = OTHER; note = 2'-fluorocytidine
  modified_base 12: mod_base = cm
  modified_base 13: mod_base = um
  modified_base 14: mod_base = gm
  modified_base 15: mod_base = um
  modified_base 16: mod_base = OTHER; note = 2'-O-methyladenosine
  modified_base 17: mod_base = um
  modified_base 18: mod_base = gm
  modified_base 19: mod_base = cm
  modified_base 20: mod_base = um
  modified_base 21: mod_base = OTHER; note = 2'-O-methyladenosine
  source 1..21: mol_type = other RNA
ggattaacttcctgtatgcta

SEQ ID NO: 567 - RNA, 21 nt, synthetic construct
  modified_base 1: mod_base = gm
  modified_base 2: mod_base = cm
  modified_base 3: mod_base = OTHER; note = 2'-O-methyladenosine
  modified_base 4: mod_base = gm
  modified_base 5: mod_base = um
  modified_base 6: mod_base = gm
  modified_base 7: mod_base = OTHER; note = 2'-O-methyladenosine
  modified_base 8: mod_base = um
  modified_base 9: mod_base = OTHER; note = 2'-fluoroguanosine
  modified_base 10: mod_base = OTHER; note = 2'-fluorouridine
  modified_base 11: mod_base = OTHER; note = 2'-fluoroadenosine
  modified_base 12: mod_base = um
  modified_base 13: mod_base = cm
  modified_base 14: mod_base = cm
  modified_base 15: mod_base = OTHER; note = 2'-O-methyladenosine
  modified_base 16: mod_base = OTHER; note = 2'-O-methyladenosine
  modified_base 17: mod_base = cm
  modified_base 18: mod_base = cm
  modified_base 19: mod_base = um
  modified_base 20: mod_base = OTHER; note = 2'-O-methyladenosine
  modified_base 21: mod_base = um
  source 1..21: mol_type = other RNA
gcagtgatgtatccaacctat

SEQ ID NO: 568 - RNA, 21 nt, synthetic construct
  modified_base 1: mod_base = gm
  modified_base 2: mod_base = um
  modified_base 3: mod_base = gm
  modified_base 4: mod_base = um
  modified_base 5: mod_base = OTHER; note = 2'-O-methyladenosine
  modified_base 6: mod_base = um
  modified_base 7: mod_base = cm
  modified_base 8: mod_base = cm
  modified_base 9: mod_base = OTHER; note = 2'-fluoroadenosine
  modified_base 10: mod_base = OTHER; note = 2'-fluoroadenosine
  modified_base 11: mod_base = OTHER; note = 2'-fluorocytidine
  modified_base 12: mod_base = cm
  modified_base 13: mod_base = um
  modified_base 14: mod_base = OTHER; note = 2'-O-methyladenosine
  modified_base 15: mod_base = um
  modified_base 16: mod_base = gm
  modified_base 17: mod_base = gm
  modified_base 18: mod_base = OTHER; note = 2'-O-methyladenosine
  modified_base 19: mod_base = OTHER; note = 2'-O-methyladenosine
  modified_base 20: mod_base = OTHER; note = 2'-O-methyladenosine
  modified_base 21: mod_base = um
  source 1..21: mol_type = other RNA
gtgtatccaacctatggaaat

SEQ ID NO: 569 - RNA, 21 nt, synthetic construct
  modified_base 1: mod_base = um
  modified_base 2: mod_base = cm
  modified_base 3: mod_base = cm
  modified_base 4: mod_base = cm
  modified_base 5: mod_base = OTHER; note = 2'-O-methyladenosine
  modified_base 6: mod_base = gm
  modified_base 7: mod_base = gm
  modified_base 8: mod_base = OTHER; note = 2'-O-methyladenosine
  modified_base 9: mod_base = OTHER; note = 2'-fluorouridine
  modified_base 10: mod_base = OTHER; note = 2'-fluoroguanosine
  modified_base 11: mod_base = OTHER; note = 2'-fluoroadenosine
  modified_base 12: mod_base = um
  modified_base 13: mod_base = OTHER; note = 2'-O-methyladenosine
  modified_base 14: mod_base = um
  modified_base 15: mod_base = um
  modified_base 16: mod_base = OTHER; note = 2'-O-methyladenosine
  modified_base 17: mod_base = OTHER; note = 2'-O-methyladenosine
  modified_base 18: mod_base = OTHER; note = 2'-O-methyladenosine
  modified_base 19: mod_base = gm
  modified_base 20: mod_base = gm
  modified_base 21: mod_base = OTHER; note = 2'-O-methyladenosine
  source 1..21: mol_type = other RNA
tcccaggatgatattaaagga

SEQ ID NO: 570 - RNA, 21 nt, synthetic construct
  modified_base 1: mod_base = gm
  modified_base 2: mod_base = OTHER; note = 2'-O-methyladenosine
  modified_base 3: mod_base = OTHER; note = 2'-O-methyladenosine
  modified_base 4: mod_base = OTHER; note = 2'-O-methyladenosine
  modified_base 5: mod_base = gm
  modified_base 6: mod_base = gm
  modified_base 7: mod_base = cm
  modified_base 8: mod_base = OTHER; note = 2'-O-methyladenosine
  modified_base 9: mod_base = OTHER; note = 2'-fluorouridine
  modified_base 10: mod_base = OTHER; note = 2'-fluorouridine
  modified_base 11: mod_base = OTHER; note = 2'-fluorocytidine
  modified_base 12: mod_base = OTHER; note = 2'-O-methyladenosine
  modified_base 13: mod_base = gm
  modified_base 14: mod_base = OTHER; note = 2'-O-methyladenosine
  modified_base 15: mod_base = OTHER; note = 2'-O-methyladenosine
  modified_base 16: mod_base = OTHER; note = 2'-O-methyladenosine
  modified_base 17: mod_base = cm
  modified_base 18: mod_base = um
  modified_base 19: mod_base = OTHER; note = 2'-O-methyladenosine
  modified_base 20: mod_base = um
  modified_base 21: mod_base = OTHER; note = 2'-O-methyladenosine
  source 1..21: mol_type = other RNA
gaaaggcattcagaaactata

SEQ ID NO: 571 - RNA, 21 nt, synthetic construct
  modified_base 1: mod_base = gm
  modified_base 2: mod_base = um
  modified_base 3: mod_base = gm
  modified_base 4: mod_base = um
  modified_base 5: mod_base = um
  modified_base 6: mod_base = gm
  modified_base 7: mod_base = cm
  modified_base 8: mod_base = OTHER; note = 2'-O-methyladenosine
  modified_base 9: mod_base = OTHER; note = 2'-fluorocytidine
  modified_base 10: mod_base = OTHER; note = 2'-fluoroadenosine
  modified_base 11: mod_base = OTHER; note = 2'-fluoroadenosine
  modified_base 12: mod_base = um
  modified_base 13: mod_base = cm
  modified_base 14: mod_base = OTHER; note = 2'-O-methyladenosine
  modified_base 15: mod_base = gm
  modified_base 16: mod_base = OTHER; note = 2'-O-methyladenosine
  modified_base 17: mod_base = OTHER; note = 2'-O-methyladenosine
  modified_base 18: mod_base = um
  modified_base 19: mod_base = um
  modified_base 20: mod_base = gm
  modified_base 21: mod_base = OTHER; note = 2'-O-methyladenosine
  source 1..21: mol_type = other RNA
gtgttgcacaatcagaattga

SEQ ID NO: 572 - RNA, 21 nt, synthetic construct
  modified_base 1: mod_base = gm
  modified_base 2: mod_base = gm
  modified_base 3: mod_base = um
  modified_base 4: mod_base = um
  modified_base 5: mod_base = gm
  modified_base 6: mod_base = cm
  modified_base 7: mod_base = OTHER; note = 2'-O-methyladenosine
  modified_base 8: mod_base = cm
  modified_base 9: mod_base = OTHER; note = 2'-fluoroadenosine
  modified_base 10: mod_base = OTHER; note = 2'-fluoroadenosine
  modified_base 11: mod_base = OTHER; note = 2'-fluorouridine
  modified_base 12: mod_base = cm
  modified_base 13: mod_base = OTHER; note = 2'-O-methyladenosine
  modified_base 14: mod_base = gm
  modified_base 15: mod_base = OTHER; note = 2'-O-methyladenosine
  modified_base 16: mod_base = OTHER; note = 2'-O-methyladenosine
  modified_base 17: mod_base = um
  modified_base 18: mod_base = um
  modified_base 19: mod_base = gm
  modified_base 20: mod_base = OTHER; note = 2'-O-methyladenosine
  modified_base 21: mod_base = um
  source 1..21: mol_type = other RNA
ggttgcacaatcagaattgat

SEQ ID NO: 573 - RNA, 21 nt, synthetic construct
  modified_base 1: mod_base = cm
  modified_base 2: mod_base = OTHER; note = 2'-O-methyladenosine
  modified_base 3: mod_base = cm
  modified_base 4: mod_base = OTHER; note = 2'-O-methyladenosine
  modified_base 5: mod_base = OTHER; note = 2'-O-methyladenosine
  modified_base 6: mod_base = um
  modified_base 7: mod_base = cm
  modified_base 8: mod_base = OTHER; note = 2'-O-methyladenosine
  modified_base 9: mod_base = OTHER; note = 2'-fluoroguanosine
  modified_base 10: mod_base = OTHER; note = 2'-fluoroadenosine
  modified_base 11: mod_base = OTHER; note = 2'-fluoroadenosine
  modified_base 12: mod_base = um
  modified_base 13: mod_base = um
  modified_base 14: mod_base = gm
  modified_base 15: mod_base = OTHER; note = 2'-O-methyladenosine
  modified_base 16: mod_base = um
  modified_base 17: mod_base = OTHER; note = 2'-O-methyladenosine
  modified_base 18: mod_base = OTHER; note = 2'-O-methyladenosine
  modified_base 19: mod_base = gm
  modified_base 20: mod_base = cm
  modified_base 21: mod_base = OTHER; note = 2'-O-methyladenosine
  source 1..21: mol_type = other RNA
cacaatcagaattgataagca

SEQ ID NO: 574 - RNA, 21 nt, synthetic construct
  modified_base 1: mod_base = gm
  modified_base 2: mod_base = cm
  modified_base 3: mod_base = OTHER; note = 2'-O-methyladenosine
  modified_base 4: mod_base = OTHER; note = 2'-O-methyladenosine
  modified_base 5: mod_base = um
  modified_base 6: mod_base = cm
  modified_base 7: mod_base = OTHER; note = 2'-O-methyladenosine
  modified_base 8: mod_base = gm
  modified_base 9: mod_base = OTHER; note = 2'-fluoroadenosine
  modified_base 10: mod_base = OTHER; note = 2'-fluoroadenosine
  modified_base 11: mod_base = OTHER; note = 2'-fluorouridine
  modified_base 12: mod_base = um
  modified_base 13: mod_base = gm
  modified_base 14: mod_base = OTHER; note = 2'-O-methyladenosine
  modified_base 15: mod_base = um
  modified_base 16: mod_base = OTHER; note = 2'-O-methyladenosine
  modified_base 17: mod_base = OTHER; note = 2'-O-methyladenosine
  modified_base 18: mod_base = gm
  modified_base 19: mod_base = cm
  modified_base 20: mod_base = OTHER; note = 2'-O-methyladenosine
  modified_base 21: mod_base = OTHER; note = 2'-O-methyladenosine
  source 1..21: mol_type = other RNA
gcaatcagaattgataagcaa

SEQ ID NO: 575 - RNA, 21 nt, synthetic construct
  modified_base 1: mod_base = gm
  modified_base 2: mod_base = um
  modified_base 3: mod_base = gm
  modified_base 4: mod_base = um
  modified_base 5: mod_base = cm
  modified_base 6: mod_base = OTHER; note = 2'-O-methyladenosine
  modified_base 7: mod_base = cm
  modified_base 8: mod_base = cm
  modified_base 9: mod_base = OTHER; note = 2'-fluorocytidine
  modified_base 10: mod_base = OTHER; note = 2'-fluorouridine
  modified_base 11: mod_base = OTHER; note = 2'-fluorouridine
  modified_base 12: mod_base = um
  modified_base 13: mod_base = um
  modified_base 14: mod_base = um
  modified_base 15: mod_base = um
  modified_base 16: mod_base = OTHER; note = 2'-O-methyladenosine
  modified_base 17: mod_base = um
  modified_base 18: mod_base = um
  modified_base 19: mod_base = gm
  modified_base 20: mod_base = cm
  modified_base 21: mod_base = OTHER; note = 2'-O-methyladenosine
  source 1..21: mol_type = other RNA
gtgtcacccttttttattgca

SEQ ID NO: 576 - RNA, 21 nt, synthetic construct
  modified_base 1: mod_base = gm
  modified_base 2: mod_base = um
  modified_base 3: mod_base = gm
  modified_base 4: mod_base = cm
  modified_base 5: mod_base = OTHER; note = 2'-O-methyladenosine
  modified_base 6: mod_base = gm
  modified_base 7: mod_base = um
  modified_base 8: mod_base = um
  modified_base 9: mod_base = OTHER; note = 2'-fluoroguanosine
  modified_base 10: mod_base = OTHER; note = 2'-fluoroguanosine
  modified_base 11: mod_base = OTHER; note = 2'-fluorouridine
  modified_base 12: mod_base = um
  modified_base 13: mod_base = um
  modified_base 14: mod_base = um
  modified_base 15: mod_base = um
  modified_base 16: mod_base = gm
  modified_base 17: mod_base = OTHER; note = 2'-O-methyladenosine
  modified_base 18: mod_base = OTHER; note = 2'-O-methyladenosine
  modified_base 19: mod_base = um
  modified_base 20: mod_base = gm
  modified_base 21: mod_base = um
  source 1..21: mol_type = other RNA
gtgcagttggtttttgaatgt

SEQ ID NO: 577 - RNA, 21 nt, synthetic construct
  modified_base 1: mod_base = gm
  modified_base 2: mod_base = cm
  modified_base 3: mod_base = OTHER; note = 2'-O-methyladenosine
  modified_base 4: mod_base = gm
  modified_base 5: mod_base = um
  modified_base 6: mod_base = um
  modified_base 7: mod_base = gm
  modified_base 8: mod_base = gm
  modified_base 9: mod_base = OTHER; note = 2'-fluorouridine
  modified_base 10: mod_base = OTHER; note = 2'-fluorouridine
  modified_base 11: mod_base = OTHER; note = 2'-fluorouridine
  modified_base 12: mod_base = um
  modified_base 13: mod_base = um
  modified_base 14: mod_base = gm
  modified_base 15: mod_base = OTHER; note = 2'-O-methyladenosine
  modified_base 16: mod_base = OTHER; note = 2'-O-methyladenosine
  modified_base 17: mod_base = um
  modified_base 18: mod_base = gm
  modified_base 19: mod_base = um
  modified_base 20: mod_base = cm
  modified_base 21: mod_base = um
  source 1..21: mol_type = other RNA
gcagttggtttttgaatgtct

SEQ ID NO: 578 - RNA, 21 nt, synthetic construct
  modified_base 1: mod_base = cm
  modified_base 2: mod_base = OTHER; note = 2'-O-methyladenosine
  modified_base 3: mod_base = gm
  modified_base 4: mod_base = um
  modified_base 5: mod_base = um
  modified_base 6: mod_base = gm
  modified_base 7: mod_base = gm
  modified_base 8: mod_base = um
  modified_base 9: mod_base = OTHER; note = 2'-fluorouridine
  modified_base 10: mod_base = OTHER; note = 2'-fluorouridine
  modified_base 11: mod_base = OTHER; note = 2'-fluorouridine
  modified_base 12: mod_base = um
  modified_base 13: mod_base = gm
  modified_base 14: mod_base = OTHER; note = 2'-O-methyladenosine
  modified_base 15: mod_base = OTHER; note = 2'-O-methyladenosine
  modified_base 16: mod_base = um
  modified_base 17: mod_base = gm
  modified_base 18: mod_base = um
  modified_base 19: mod_base = cm
  modified_base 20: mod_base = um
  modified_base 21: mod_base = um
  source 1..21: mol_type = other RNA
cagttggtttttgaatgtctt

SEQ ID NO: 579 - RNA, 21 nt, synthetic construct
  modified_base 1: mod_base = cm
  modified_base 2: mod_base = OTHER; note = 2'-O-methyladenosine
  modified_base 3: mod_base = cm
  modified_base 4: mod_base = um
  modified_base 5: mod_base = cm
  modified_base 6: mod_base = cm
  modified_base 7: mod_base = um
  modified_base 8: mod_base = um
  modified_base 9: mod_base = OTHER; note = 2'-fluorouridine
  modified_base 10: mod_base = OTHER; note = 2'-fluorouridine
  modified_base 11: mod_base = OTHER; note = 2'-fluoroadenosine
  modified_base 12: mod_base = OTHER; note = 2'-O-methyladenosine
  modified_base 13: mod_base = gm
  modified_base 14: mod_base = gm
  modified_base 15: mod_base = OTHER; note = 2'-O-methyladenosine
  modified_base 16: mod_base = um
  modified_base 17: mod_base = OTHER; note = 2'-O-methyladenosine
  modified_base 18: mod_base = OTHER; note = 2'-O-methyladenosine
  modified_base 19: mod_base = OTHER; note = 2'-O-methyladenosine
  modified_base 20: mod_base = cm
  modified_base 21: mod_base = um
  source 1..21: mol_type = other RNA
cactccttttaaggataaact

SEQ ID NO: 580 - RNA, 21 nt, synthetic construct
  modified_base 1: mod_base = gm
  modified_base 1^2: mod_base = OTHER; note = phosphorothioate linkage
  modified_base 2: mod_base = OTHER; note = 2'-O-methyladenosine
  modified_base 3: mod_base = um
  modified_base 4: mod_base = gm
  modified_base 5: mod_base = um
  modified_base 6: mod_base = gm
  modified_base 7: mod_base = gm
  modified_base 8: mod_base = OTHER; note = 2'-O-methyladenosine
  modified_base 9: mod_base = OTHER; note = 2'-fluoroguanosine
  modified_base 10: mod_base = OTHER; note = 2'-fluorouridine
  modified_base 11: mod_base = OTHER; note = 2'-fluoroguanosine
  modified_base 12: mod_base = cm
  modified_base 13: mod_base = cm
  modified_base 14: mod_base = OTHER; note = 2'-O-methyladenosine
  modified_base 15: mod_base = gm
  modified_base 16: mod_base = OTHER; note = 2'-O-methyladenosine
  modified_base 17: mod_base = um
  modified_base 18: mod_base = gm
  modified_base 19: mod_base = um
  modified_base 20: mod_base = um
  modified_base 21: mod_base = OTHER; note = 2'-O-methyladenosine
  source 1..21: mol_type = other RNA
gatgtggagtgccagatgtta

SEQ ID NO: 581 - RNA, 21 nt, synthetic construct
  modified_base 1: mod_base = gm
  modified_base 1^2: mod_base = OTHER; note = phosphorothioate linkage
  modified_base 2: mod_base = OTHER; note = 2'-O-methyladenosine
  modified_base 3: mod_base = um
  modified_base 4: mod_base = gm
  modified_base 5: mod_base = um
  modified_base 6: mod_base = gm
  modified_base 7: mod_base = gm
  modified_base 8: mod_base = OTHER; note = 2'-O-methyladenosine
  modified_base 9: mod_base = OTHER; note = 2'-fluoroguanosine
  modified_base 10: mod_base = um
  modified_base 11: mod_base = OTHER; note = 2'-fluoroguanosine
  modified_base 12: mod_base = cm
  modified_base 13: mod_base = OTHER; note = 2'-fluorocytidine
  modified_base 14: mod_base = OTHER; note = 2'-O-methyladenosine
  modified_base 15: mod_base = gm
  modified_base 16: mod_base = OTHER; note = 2'-O-methyladenosine
  modified_base 17: mod_base = um
  modified_base 18: mod_base = gm
  modified_base 19: mod_base = um
  modified_base 20: mod_base = um
  modified_base 21: mod_base = OTHER; note = 2'-O-methyladenosine
  source 1..21: mol_type = other RNA
gatgtggagtgccagatgtta

SEQ ID NO: 582 - RNA, 21 nt, synthetic construct
  modified_base 1: mod_base = cm
  modified_base 2: mod_base = um
  modified_base 3: mod_base = gm
  modified_base 4: mod_base = um
  modified_base 5: mod_base = um
  modified_base 6: mod_base = gm
  modified_base 7: mod_base = cm
  modified_base 8: mod_base = OTHER; note = 2'-O-methyladenosine
  modified_base 9: mod_base = OTHER; note = 2'-fluorocytidine
  modified_base 10: mod_base = OTHER; note = 2'-fluoroadenosine
  modified_base 11: mod_base = OTHER; note = 2'-fluoroadenosine
  modified_base 12: mod_base = um
  modified_base 13: mod_base = cm
  modified_base 14: mod_base = OTHER; note = 2'-O-methyladenosine
  modified_base 15: mod_base = gm
  modified_base 16: mod_base = OTHER; note = 2'-O-methyladenosine
  modified_base 17: mod_base = OTHER; note = 2'-O-methyladenosine
  modified_base 18: mod_base = um
  modified_base 19: mod_base = um
  modified_base 20: mod_base = gm
  modified_base 21: mod_base = OTHER; note = 2'-O-methyladenosine
  source 1..21: mol_type = other RNA
ctgttgcacaatcagaattga

SEQ ID NO: 583 - RNA, 21 nt, synthetic construct
  modified_base 1: mod_base = gm
  modified_base 2: mod_base = um
  modified_base 3: mod_base = gm
  modified_base 4: mod_base = um
  modified_base 5: mod_base = um
  modified_base 6: mod_base = gm
  modified_base 7: mod_base = OTHER; note = 2'-fluorocytidine
  modified_base 8: mod_base = OTHER; note = 2'-O-methyladenosine
  modified_base 9: mod_base = OTHER; note = 2'-fluorocytidine
  modified_base 10: mod_base = OTHER; note = 2'-O-methyladenosine
  modified_base 11: mod_base = OTHER; note = 2'-fluoroadenosine
  modified_base 12: mod_base = um
  modified_base 13: mod_base = cm
  modified_base 14: mod_base = OTHER; note = 2'-O-methyladenosine
  modified_base 15: mod_base = gm
  modified_base 16: mod_base = OTHER; note = 2'-O-methyladenosine
  modified_base 17: mod_base = OTHER; note = 2'-O-methyladenosine
  modified_base 18: mod_base = um
  modified_base 19: mod_base = um
  modified_base 20: mod_base = gm
  modified_base 21: mod_base = OTHER; note = 2'-O-methyladenosine
  source 1..21: mol_type = other RNA
gtgttgcacaatcagaattga

SEQ ID NO: 584 - RNA, 21 nt, synthetic construct
  modified_base 1: mod_base = gm
  modified_base 2: mod_base = um
  modified_base 3: mod_base = gm
  modified_base 4: mod_base = um
  modified_base 5: mod_base = um
  modified_base 6: mod_base = gm
  modified_base 7: mod_base = cm
  modified_base 8: mod_base = OTHER; note = 2'-O-methyladenosine
  modified_base 9: mod_base = OTHER; note = 2'-fluorocytidine
  modified_base 10: mod_base = OTHER; note = 2'-O-methyladenosine
  modified_base 11: mod_base = OTHER; note = 2'-fluoroadenosine
  modified_base 12: mod_base = um
  modified_base 13: mod_base = OTHER; note = 2'-fluorocytidine
  modified_base 14: mod_base = OTHER; note = 2'-O-methyladenosine
  modified_base 15: mod_base = gm
  modified_base 16: mod_base = OTHER; note = 2'-O-methyladenosine
  modified_base 17: mod_base = OTHER; note = 2'-O-methyladenosine
  modified_base 18: mod_base = um
  modified_base 19: mod_base = um
  modified_base 20: mod_base = gm
  modified_base 21: mod_base = OTHER; note = 2'-O-methyladenosine
  source 1..21: mol_type = other RNA
gtgttgcacaatcagaattga

SEQ ID NO: 585 - RNA, 21 nt, synthetic construct
  modified_base 1: mod_base = gm
  modified_base 2: mod_base = um
  modified_base 3: mod_base = gm
  modified_base 4: mod_base = um
  modified_base 5: mod_base = um
  modified_base 6: mod_base = gm
  modified_base 7: mod_base = cm
  modified_base 8: mod_base = OTHER; note = 2'-O-methyladenosine
  modified_base 9: mod_base = OTHER; note = 2'-fluorocytidine
  modified_base 10: mod_base = OTHER; note = 2'-O-methyladenosine
  modified_base 11: mod_base = OTHER; note = 2'-fluoroadenosine
  modified_base 12: mod_base = um
  modified_base 13: mod_base = cm
  modified_base 14: mod_base = OTHER; note = 2'-O-methyladenosine
  modified_base 15: mod_base = gm
  modified_base 16: mod_base = OTHER; note = 2'-O-methyladenosine
  modified_base 17: mod_base = OTHER; note = 2'-O-methyladenosine
  modified_base 18: mod_base = um
  modified_base 19: mod_base = um
  modified_base 20: mod_base = gm
  modified_base 21: mod_base = OTHER; note = 2'-O-methyladenosine
  source 1..21: mol_type = other RNA
gtgttgcacaatcagaattga

SEQ ID NO: 586 - RNA, 21 nt, synthetic construct
  modified_base 1: mod_base = cm
  modified_base 2: mod_base = OTHER; note = 2'-O-methyladenosine
  modified_base 3: mod_base = gm
  modified_base 4: mod_base = um
  modified_base 5: mod_base = gm
  modified_base 6: mod_base = gm
  modified_base 7: mod_base = OTHER; note = 2'-O-methyladenosine
  modified_base 8: mod_base = um
  modified_base 9: mod_base = OTHER; note = 2'-fluorocytidine
  modified_base 10: mod_base = OTHER; note = 2'-fluoroguanosine
  modified_base 11: mod_base = OTHER; note = 2'-fluoroadenosine
  modified_base 12: mod_base = um
  modified_base 13: mod_base = um
  modified_base 14: mod_base = OTHER; note = 2'-O-methyladenosine
  modified_base 15: mod_base = gm
  modified_base 16: mod_base = um
  modified_base 17: mod_base = gm
  modified_base 18: mod_base = um
  modified_base 19: mod_base = cm
  modified_base 20: mod_base = OTHER; note = 2'-O-methyladenosine
  modified_base 21: mod_base = OTHER; note = 2'-O-methyladenosine
  source 1..21: mol_type = other RNA
cagtggatcgattagtgtcaa

SEQ ID NO: 587 - RNA, 21 nt, synthetic construct
  modified_base 1: mod_base = cm
  modified_base 2: mod_base = OTHER; note = 2'-O-methyladenosine
  modified_base 3: mod_base = gm
  modified_base 4: mod_base = um
  modified_base 5: mod_base = gm
  modified_base 6: mod_base = gm
  modified_base 7: mod_base = OTHER; note = 2'-fluoroadenosine
  modified_base 8: mod_base = um
  modified_base 9: mod_base = OTHER; note = 2'-fluorocytidine
  modified_base 10: mod_base = gm
  modified_base 11: mod_base = OTHER; note = 2'-fluoroadenosine
  modified_base 12: mod_base = um
  modified_base 13: mod_base = um
  modified_base 14: mod_base = OTHER; note = 2'-O-methyladenosine
  modified_base 15: mod_base = gm
  modified_base 16: mod_base = um
  modified_base 17: mod_base = gm
  modified_base 18: mod_base = um
  modified_base 19: mod_base = cm
  modified_base 20: mod_base = OTHER; note = 2'-O-methyladenosine
  modified_base 21: mod_base = OTHER; note = 2'-O-methyladenosine
  source 1..21: mol_type = other RNA
cagtggatcgattagtgtcaa

SEQ ID NO: 588 - RNA, 21 nt, synthetic construct
  modified_base 1: mod_base = cm
  modified_base 2: mod_base = OTHER; note = 2'-O-methyladenosine
  modified_base 3: mod_base = gm
  modified_base 4: mod_base = um
  modified_base 5: mod_base = gm
  modified_base 6: mod_base = gm
  modified_base 7: mod_base = OTHER; note = 2'-O-methyladenosine
  modified_base 8: mod_base = um
  modified_base 9: mod_base = OTHER; note = 2'-fluorocytidine
  modified_base 10: mod_base = gm
  modified_base 11: mod_base = OTHER; note = 2'-fluoroadenosine
  modified_base 12: mod_base = um
  modified_base 13: mod_base = OTHER; note = 2'-fluorouridine
  modified_base 14: mod_base = OTHER; note = 2'-O-methyladenosine
  modified_base 15: mod_base = gm
  modified_base 16: mod_base = um
  modified_base 17: mod_base = gm
  modified_base 18: mod_base = um
  modified_base 19: mod_base = cm
  modified_base 20: mod_base = OTHER; note = 2'-O-methyladenosine
  modified_base 21: mod_base = OTHER; note = 2'-O-methyladenosine
  source 1..21: mol_type = other RNA
cagtggatcgattagtgtcaa

SEQ ID NO: 589 - RNA, 21 nt, synthetic construct
  modified_base 1: mod_base = cm
  modified_base 2: mod_base = OTHER; note = 2'-O-methyladenosine
  modified_base 3: mod_base = gm
  modified_base 4: mod_base = um
  modified_base 5: mod_base = gm
  modified_base 6: mod_base = gm
  modified_base 7: mod_base = OTHER; note = 2'-O-methyladenosine
  modified_base 8: mod_base = um
  modified_base 9: mod_base = OTHER; note = 2'-fluorocytidine
  modified_base 10: mod_base = gm
  modified_base 11: mod_base = OTHER; note = 2'-fluoroadenosine
  modified_base 12: mod_base = um
  modified_base 13: mod_base = OTHER; note = 2'-fluorouridine
  modified_base 14: mod_base = OTHER; note = 2'-O-methyladenosine
  modified_base 15: mod_base = gm
  modified_base 16: mod_base = um
  modified_base 17: mod_base = OTHER; note = 2-O-methylinosine
  modified_base 18: mod_base = um
  modified_base 19: mod_base = cm
  modified_base 20: mod_base = OTHER; note = 2'-O-methyladenosine
  modified_base 21: mod_base = OTHER; note = 2'-O-methyladenosine
  source 1..21: mol_type = other RNA
cagtggatcgattagtntcaa

SEQ ID NO: 590 - RNA, 21 nt, synthetic construct
  modified_base 1: mod_base = um
  modified_base 2: mod_base = cm
  modified_base 3: mod_base = cm
  modified_base 4: mod_base = cm
  modified_base 5: mod_base = OTHER; note = 2'-O-methyladenosine
  modified_base 6: mod_base = gm
  modified_base 7: mod_base = gm
  modified_base 8: mod_base = OTHER; note = 2'-O-methyladenosine
  modified_base 9: mod_base = OTHER; note = 2'-fluorouridine
  modified_base 10: mod_base = OTHER; note = 2'-fluoroguanosine
  modified_base 11: mod_base = OTHER; note = 2'-fluoroadenosine
  modified_base 12: mod_base = um
  modified_base 13: mod_base = OTHER; note = 2'-fluoroadenosine
  modified_base 14: mod_base = um
  modified_base 15: mod_base = um
  modified_base 16: mod_base = OTHER; note = 2'-O-methyladenosine
  modified_base 17: mod_base = OTHER; note = 2'-O-methyladenosine
  modified_base 18: mod_base = OTHER; note = 2'-O-methyladenosine
  modified_base 19: mod_base = gm
  modified_base 20: mod_base = gm
  modified_base 21: mod_base = OTHER; note = 2'-O-methyladenosine
  source 1..21: mol_type = other RNA
tcccaggatgatattaaagga

SEQ ID NO: 591 - RNA, 21 nt, synthetic construct
  modified_base 1: mod_base = um
  modified_base 2: mod_base = cm
  modified_base 3: mod_base = cm
  modified_base 4: mod_base = cm
  modified_base 5: mod_base = OTHER; note = 2'-O-methyladenosine
  modified_base 6: mod_base = gm
  modified_base 7: mod_base = gm
  modified_base 8: mod_base = OTHER; note = 2'-O-methyladenosine
  modified_base 9: mod_base = OTHER; note = 2'-fluorouridine
  modified_base 10: mod_base = gm
  modified_base 11: mod_base = OTHER; note = 2'-fluoroadenosine
  modified_base 12: mod_base = um
  modified_base 13: mod_base = OTHER; note = 2'-fluoroadenosine
  modified_base 14: mod_base = um
  modified_base 15: mod_base = um
  modified_base 16: mod_base = OTHER; note = 2'-O-methyladenosine
  modified_base 17: mod_base = OTHER; note = 2'-O-methyladenosine
  modified_base 18: mod_base = OTHER; note = 2'-O-methyladenosine
  modified_base 19: mod_base = gm
  modified_base 20: mod_base = gm
  modified_base 21: mod_base = OTHER; note = 2'-O-methyladenosine
  source 1..21: mol_type = other RNA
tcccaggatgatattaaagga

SEQ ID NO: 592 - RNA, 21 nt, synthetic construct
  modified_base 1: mod_base = um
  modified_base 2: mod_base = cm
  modified_base 3: mod_base = cm
  modified_base 4: mod_base = cm
  modified_base 5: mod_base = OTHER; note = 2'-O-methyladenosine
  modified_base 6: mod_base = gm
  modified_base 7: mod_base = gm
  modified_base 8: mod_base = OTHER; note = 2'-O-methyladenosine
  modified_base 9: mod_base = OTHER; note = 2'-fluorouridine
  modified_base 10: mod_base = OTHER; note = 2'-fluoroguanosine
  modified_base 11: mod_base = OTHER; note = 2'-fluoroadenosine
  modified_base 12: mod_base = um
  modified_base 13: mod_base = OTHER; note = 2-aminoadenosine
  modified_base 14: mod_base = um
  modified_base 15: mod_base = um
  modified_base 16: mod_base = OTHER; note = 2'-O-methyladenosine
  modified_base 17: mod_base = OTHER; note = 2'-O-methyladenosine
  modified_base 18: mod_base = OTHER; note = 2'-O-methyladenosine
  modified_base 19: mod_base = gm
  modified_base 20: mod_base = gm
  modified_base 21: mod_base = OTHER; note = 2'-O-methyladenosine
  source 1..21: mol_type = other RNA
tcccaggatgatattaaagga

SEQ ID NO: 593 - RNA, 21 nt, synthetic construct
  modified_base 1: mod_base = gm
  modified_base 2: mod_base = cm
  modified_base 3: mod_base = OTHER; note = 2'-O-methyladenosine
  modified_base 4: mod_base = gm
  modified_base 5: mod_base = um
  modified_base 6: mod_base = um
  modified_base 7: mod_base = gm
  modified_base 8: mod_base = gm
  modified_base 9: mod_base = OTHER; note = 2'-fluorouridine
  modified_base 10: mod_base = um
  modified_base 11: mod_base = OTHER; note = 2'-fluorouridine
  modified_base 12: mod_base = um
  modified_base 13: mod_base = OTHER; note = 2'-fluorouridine
  modified_base 14: mod_base = gm
  modified_base 15: mod_base = OTHER; note = 2'-O-methyladenosine
  modified_base 16: mod_base = OTHER; note = 2'-O-methyladenosine
  modified_base 17: mod_base = um
  modified_base 18: mod_base = gm
  modified_base 19: mod_base = um
  modified_base 20: mod_base = cm
  modified_base 21: mod_base = um
  source 1..21: mol_type = other RNA
gcagttggtttttgaatgtct

SEQ ID NO: 594 - RNA, 21 nt, synthetic construct
  modified_base 1: mod_base = gm
  modified_base 2: mod_base = cm
  modified_base 3: mod_base = OTHER; note = 2'-O-methyladenosine
  modified_base 4: mod_base = gm
  modified_base 5: mod_base = um
  modified_base 6: mod_base = um
  modified_base 7: mod_base = gm
  modified_base 8: mod_base = gm
  modified_base 9: mod_base = OTHER; note = 2'-fluorouridine
  modified_base 10: mod_base = OTHER; note = 2'-fluorouridine
  modified_base 11: mod_base = OTHER; note = 2'-fluorouridine
  modified_base 12: mod_base = um
  modified_base 13: mod_base = OTHER; note = 2'-fluorouridine
  modified_base 14: mod_base = gm
  modified_base 15: mod_base = OTHER; note = 2'-O-methyladenosine
  modified_base 16: mod_base = OTHER; note = 2'-O-methyladenosine
  modified_base 17: mod_base = um
  modified_base 18: mod_base = gm
  modified_base 19: mod_base = um
  modified_base 20: mod_base = cm
  modified_base 21: mod_base = um
  source 1..21: mol_type = other RNA
gcagttggtttttgaatgtct

SEQ ID NO: 595 - RNA, 21 nt, synthetic construct
  modified_base 1: mod_base = gm
  modified_base 2: mod_base = cm
  modified_base 3: mod_base = OTHER; note = 2'-O-methyladenosine
  modified_base 4: mod_base = gm
  modified_base 5: mod_base = um
  modified_base 6: mod_base = gm
  modified_base 7: mod_base = OTHER; note = 2'-O-methyladenosine
  modified_base 8: mod_base = um
  modified_base 9: mod_base = OTHER; note = 2'-fluoroguanosine
  modified_base 10: mod_base = um
  modified_base 11: mod_base = OTHER; note = 2'-fluoroadenosine
  modified_base 12: mod_base = OTHER; note = 2'-fluorouridine
  modified_base 13: mod_base = cm
  modified_base 14: mod_base = cm
  modified_base 15: mod_base = OTHER; note = 2'-O-methyladenosine
  modified_base 16: mod_base = OTHER; note = 2'-O-methyladenosine
  modified_base 17: mod_base = cm
  modified_base 18: mod_base = cm
  modified_base 19: mod_base = um
  modified_base 20: mod_base = OTHER; note = 2'-O-methyladenosine
  modified_base 21: mod_base = um
  source 1..21: mol_type = other RNA
gcagtgatgtatccaacctat

SEQ ID NO: 596 - RNA, 21 nt, synthetic construct
  modified_base 1: mod_base = gm
  modified_base 2: mod_base = cm
  modified_base 3: mod_base = OTHER; note = 2'-O-methyladenosine
  modified_base 4: mod_base = gm
  modified_base 5: mod_base = um
  modified_base 6: mod_base = gm
  modified_base 7: mod_base = OTHER; note = 2'-fluoroadenosine
  modified_base 8: mod_base = um
  modified_base 9: mod_base = OTHER; note = 2'-fluoroguanosine
  modified_base 10: mod_base = um
  modified_base 11: mod_base = OTHER; note = 2'-fluoroadenosine
  modified_base 12: mod_base = um
  modified_base 13: mod_base = cm
  modified_base 14: mod_base = cm
  modified_base 15: mod_base = OTHER; note = 2'-O-methyladenosine
  modified_base 16: mod_base = OTHER; note = 2'-O-methyladenosine
  modified_base 17: mod_base = cm
  modified_base 18: mod_base = cm
  modified_base 19: mod_base = um
  modified_base 20: mod_base = OTHER; note = 2'-O-methyladenosine
  modified_base 21: mod_base = um
  source 1..21: mol_type = other RNA
gcagtgatgtatccaacctat

SEQ ID NO: 597 - RNA, 21 nt, synthetic construct
  modified_base 1: mod_base = gm
  modified_base 2: mod_base = cm
  modified_base 3: mod_base = OTHER; note = 2'-O-methyladenosine
  modified_base 4: mod_base = gm
  modified_base 5: mod_base = um
  modified_base 6: mod_base = gm
  modified_base 7: mod_base = OTHER; note = 2'-O-methyladenosine
  modified_base 8: mod_base = um
  modified_base 9: mod_base = OTHER; note = 2'-fluoroguanosine
  modified_base 10: mod_base = um
  modified_base 11: mod_base = OTHER; note = 2'-fluoroadenosine
  modified_base 12: mod_base = um
  modified_base 13: mod_base = OTHER; note = 2'-fluorocytidine
  modified_base 14: mod_base = cm
  modified_base 15: mod_base = OTHER; note = 2'-O-methyladenosine
  modified_base 16: mod_base = OTHER; note = 2'-O-methyladenosine
  modified_base 17: mod_base = cm
  modified_base 18: mod_base = cm
  modified_base 19: mod_base = um
  modified_base 20: mod_base = OTHER; note = 2'-O-methyladenosine
  modified_base 21: mod_base = um
  source 1..21: mol_type = other RNA
gcagtgatgtatccaacctat

SEQ ID NO: 598 - RNA, 21 nt, synthetic construct
  modified_base 1: mod_base = gm
  modified_base 2: mod_base = cm
  modified_base 3: mod_base = cm
  modified_base 4: mod_base = OTHER; note = 2'-O-methyladenosine
  modified_base 5: mod_base = gm
  modified_base 6: mod_base = OTHER; note = 2'-O-methyladenosine
  modified_base 7: mod_base = um
  modified_base 8: mod_base = gm
  modified_base 9: mod_base = OTHER; note = 2'-fluorouridine
  modified_base 10: mod_base = um
  modified_base 11: mod_base = OTHER; note = 2'-fluoroguanosine
  modified_base 12: mod_base = cm
  modified_base 13: mod_base = OTHER; note = 2'-fluoroadenosine
  modified_base 14: mod_base = gm
  modified_base 15: mod_base = OTHER; note = 2'-O-methyladenosine
  modified_base 16: mod_base = OTHER; note = 2'-O-methyladenosine
  modified_base 17: mod_base = um
  modified_base 18: mod_base = OTHER; note = 2'-O-methyladenosine
  modified_base 19: mod_base = cm
  modified_base 20: mod_base = um
  modified_base 21: mod_base = OTHER; note = 2'-O-methyladenosine
  source 1..21: mol_type = other RNA
gccagatgttgcagaatacta

SEQ ID NO: 599 - RNA, 21 nt, synthetic construct
  modified_base 1: mod_base = gm
  modified_base 2: mod_base = cm
  modified_base 3: mod_base = cm
  modified_base 4: mod_base = OTHER; note = 2'-O-methyladenosine
  modified_base 5: mod_base = gm
  modified_base 6: mod_base = OTHER; note = 2'-O-methyladenosine
  modified_base 7: mod_base = OTHER; note = 2'-fluorouridine
  modified_base 8: mod_base = gm
  modified_base 9: mod_base = OTHER; note = 2'-fluorouridine
  modified_base 10: mod_base = um
  modified_base 11: mod_base = OTHER; note = 2'-fluoroguanosine
  modified_base 12: mod_base = cm
  modified_base 13: mod_base = OTHER; note = 2'-O-methyladenosine
  modified_base 14: mod_base = gm
  modified_base 15: mod_base = OTHER; note = 2'-O-methyladenosine
  modified_base 16: mod_base = OTHER; note = 2'-O-methyladenosine
  modified_base 17: mod_base = um
  modified_base 18: mod_base = OTHER; note = 2'-O-methyladenosine
  modified_base 19: mod_base = cm
  modified_base 20: mod_base = um
  modified_base 21: mod_base = OTHER; note = 2'-O-methyladenosine
  source 1..21: mol_type = other RNA
gccagatgttgcagaatacta

SEQ ID NO: 600 - RNA, 21 nt, synthetic construct
  modified_base 1: mod_base = cm
  modified_base 2: mod_base = OTHER; note = 2'-O-methyladenosine
  modified_base 3: mod_base = cm
  modified_base 4: mod_base = um
  modified_base 5: mod_base = cm
  modified_base 6: mod_base = cm
  modified_base 7: mod_base = OTHER; note = 2'-fluorouridine
  modified_base 8: mod_base = um
  modified_base 9: mod_base = OTHER; note = 2'-fluorouridine
  modified_base 10: mod_base = um
  modified_base 11: mod_base = OTHER; note = 2'-fluoroadenosine
  modified_base 12: mod_base = OTHER; note = 2'-O-methyladenosine
  modified_base 13: mod_base = gm
  modified_base 14: mod_base = gm
  modified_base 15: mod_base = OTHER; note = 2'-O-methyladenosine
  modified_base 16: mod_base = um
  modified_base 17: mod_base = OTHER; note = 2'-O-methyladenosine
  modified_base 18: mod_base = OTHER; note = 2'-O-methyladenosine
  modified_base 19: mod_base = OTHER; note = 2'-O-methyladenosine
  modified_base 20: mod_base = cm
  modified_base 21: mod_base = um
  source 1..21: mol_type = other RNA
cactccttttaaggataaact

SEQ ID NO: 601 - RNA, 21 nt, synthetic construct
  modified_base 1: mod_base = cm
  modified_base 2: mod_base = OTHER; note = 2'-O-methyladenosine
  modified_base 3: mod_base = cm
  modified_base 4: mod_base = um
  modified_base 5: mod_base = cm
  modified_base 6: mod_base = cm
  modified_base 7: mod_base = um
  modified_base 8: mod_base = um
  modified_base 9: mod_base = OTHER; note = 2'-fluorouridine
  modified_base 10: mod_base = um
  modified_base 11: mod_base = OTHER; note = 2'-fluoroadenosine
  modified_base 12: mod_base = OTHER; note = 2'-fluoroadenosine
  modified_base 13: mod_base = gm
  modified_base 14: mod_base = gm
  modified_base 15: mod_base = OTHER; note = 2'-O-methyladenosine
  modified_base 16: mod_base = um
  modified_base 17: mod_base = OTHER; note = 2'-O-methyladenosine
  modified_base 18: mod_base = OTHER; note = 2'-O-methyladenosine
  modified_base 19: mod_base = OTHER; note = 2'-O-methyladenosine
  modified_base 20: mod_base = cm
  modified_base 21: mod_base = um
  source 1..21: mol_type = other RNA
cactccttttaaggataaact

SEQ ID NO: 602 - RNA, 21 nt, synthetic construct
  modified_base 1: mod_base = gm
  modified_base 2: mod_base = OTHER; note = 2'-O-methyladenosine
  modified_base 3: mod_base = cm
  modified_base 4: mod_base = um
  modified_base 5: mod_base = cm
  modified_base 6: mod_base = cm
  modified_base 7: mod_base = um
  modified_base 8: mod_base = um
  modified_base 9: mod_base = OTHER; note = 2'-fluorouridine
  modified_base 10: mod_base = OTHER; note = 2'-fluorouridine
  modified_base 11: mod_base = OTHER; note = 2'-fluoroadenosine
  modified_base 12: mod_base = OTHER; note = 2'-O-methyladenosine
  modified_base 13: mod_base = gm
  modified_base 14: mod_base = gm
  modified_base 15: mod_base = OTHER; note = 2'-O-methyladenosine
  modified_base 16: mod_base = um
  modified_base 17: mod_base = OTHER; note = 2'-O-methyladenosine
  modified_base 18: mod_base = OTHER; note = 2'-O-methyladenosine
  modified_base 19: mod_base = OTHER; note = 2'-O-methyladenosine
  modified_base 20: mod_base = cm
  modified_base 21: mod_base = um
  source 1..21: mol_type = other RNA
gactccttttaaggataaact

SEQ ID NO: 603 - RNA, 21 nt, synthetic construct
  modified_base 1: mod_base = gm
  modified_base 1^2: mod_base = OTHER; note = phosphorothioate linkage
  modified_base 2: mod_base = cm
  modified_base 3: mod_base = OTHER; note = 2'-O-methyladenosine
  modified_base 4: mod_base = gm
  modified_base 5: mod_base = um
  modified_base 6: mod_base = um
  modified_base 7: mod_base = gm
  modified_base 8: mod_base = gm
  modified_base 9: mod_base = OTHER; note = 2'-fluorouridine
  modified_base 10: mod_base = um
  modified_base 11: mod_base = OTHER; note = 2'-fluorouridine
  modified_base 12: mod_base = um
  modified_base 13: mod_base = OTHER; note = 2'-fluorouridine
  modified_base 14: mod_base = gm
  modified_base 15: mod_base = OTHER; note = 2'-O-methyladenosine
  modified_base 16: mod_base = OTHER; note = 2'-O-methyladenosine
  modified_base 17: mod_base = um
  modified_base 18: mod_base = gm
  modified_base 19: mod_base = um
  modified_base 20: mod_base = cm
  modified_base 21: mod_base = um
  source 1..21: mol_type = other RNA
gcagttggtttttgaatgtct

SEQ ID NO: 604 - RNA, 21 nt, synthetic construct
  modified_base 1: mod_base = gm
  modified_base 1^2: mod_base = OTHER; note = phosphorothioate linkage
  modified_base 2: mod_base = cm
  modified_base 3: mod_base = OTHER; note = 2'-O-methyladenosine
  modified_base 4: mod_base = gm
  modified_base 5: mod_base = um
  modified_base 6: mod_base = um
  modified_base 7: mod_base = gm
  modified_base 8: mod_base = gm
  modified_base 9: mod_base = OTHER; note = 2'-fluorouridine
  modified_base 10: mod_base = OTHER; note = 2'-fluorouridine
  modified_base 11: mod_base = OTHER; note = 2'-fluorouridine
  modified_base 12: mod_base = um
  modified_base 13: mod_base = um
  modified_base 14: mod_base = gm
  modified_base 15: mod_base = OTHER; note = 2'-O-methyladenosine
  modified_base 16: mod_base = OTHER; note = 2'-O-methyladenosine
  modified_base 17: mod_base = um
  modified_base 18: mod_base = gm
  modified_base 19: mod_base = um
  modified_base 20: mod_base = cm
  modified_base 21: mod_base = um
  source 1..21: mol_type = other RNA
gcagttggtttttgaatgtct

SEQ ID NO: 605 - RNA, 21 nt, synthetic construct
  modified_base 1: mod_base = cm
  modified_base 1^2: mod_base = OTHER; note = phosphorothioate linkage
  modified_base 2: mod_base = OTHER; note = 2'-O-methyladenosine
  modified_base 3: mod_base = gm
  modified_base 4: mod_base = um
  modified_base 5: mod_base = gm
  modified_base 6: mod_base = gm
  modified_base 7: mod_base = OTHER; note = 2'-O-methyladenosine
  modified_base 8: mod_base = um
  modified_base 9: mod_base = OTHER; note = 2'-fluorocytidine
  modified_base 10: mod_base = gm
  modified_base 11: mod_base = OTHER; note = 2'-fluoroadenosine
  modified_base 12: mod_base = um
  modified_base 13: mod_base = OTHER; note = 2'-fluorouridine
  modified_base 14: mod_base = OTHER; note = 2'-O-methyladenosine
  modified_base 15: mod_base = gm
  modified_base 16: mod_base = um
  modified_base 17: mod_base = gm
  modified_base 18: mod_base = um
  modified_base 19: mod_base = cm
  modified_base 20: mod_base = OTHER; note = 2'-O-methyladenosine
  modified_base 21: mod_base = OTHER; note = 2'-O-methyladenosine
  source 1..21: mol_type = other RNA
cagtggatcgattagtgtcaa

SEQ ID NO: 606 - RNA, 21 nt, synthetic construct
  modified_base 1: mod_base = cm
  modified_base 1^2: mod_base = OTHER; note = phosphorothioate linkage
  modified_base 2: mod_base = OTHER; note = 2'-O-methyladenosine
  modified_base 3: mod_base = gm
  modified_base 4: mod_base = um
  modified_base 5: mod_base = gm
  modified_base 6: mod_base = gm
  modified_base 7: mod_base = OTHER; note = 2'-O-methyladenosine
  modified_base 8: mod_base = um
  modified_base 9: mod_base = OTHER; note = 2'-fluorocytidine
  modified_base 10: mod_base = gm
  modified_base 11: mod_base = OTHER; note = 2'-fluoroadenosine
  modified_base 12: mod_base = um
  modified_base 13: mod_base = OTHER; note = 2'-fluorouridine
  modified_base 14: mod_base = OTHER; note = 2'-O-methyladenosine
  modified_base 15: mod_base = gm
  modified_base 16: mod_base = um
  modified_base 17: mod_base = OTHER; note = 2-O-methylinosine
  modified_base 18: mod_base = um
  modified_base 19: mod_base = cm
  modified_base 20: mod_base = OTHER; note = 2'-O-methyladenosine
  modified_base 21: mod_base = OTHER; note = 2'-O-methyladenosine
  source 1..21: mol_type = other RNA
cagtggatcgattagtntcaa

SEQ ID NO: 607 - RNA, 21 nt, synthetic construct
  modified_base 1: mod_base = gm
  modified_base 1^2: mod_base = OTHER; note = phosphorothioate linkage
  modified_base 2: mod_base = cm
  modified_base 3: mod_base = OTHER; note = 2'-O-methyladenosine
  modified_base 4: mod_base = gm
  modified_base 5: mod_base = um
  modified_base 6: mod_base = um
  modified_base 7: mod_base = gm
  modified_base 8: mod_base = gm
  modified_base 9: mod_base = OTHER; note = 2'-fluorouridine
  modified_base 10: mod_base = um
  modified_base 11: mod_base = OTHER; note = 2'-fluorouridine
  modified_base 12: mod_base = um
  modified_base 13: mod_base = OTHER; note = 2'-fluorouridine
  modified_base 14: mod_base = gm
  modified_base 15: mod_base = OTHER; note = 2'-O-methyladenosine
  modified_base 16: mod_base = OTHER; note = 2'-O-methyladenosine
  modified_base 17: mod_base = um
  modified_base 18: mod_base = gm
  modified_base 19: mod_base = um
  modified_base 20: mod_base = cm
  modified_base 21: mod_base = OTHER; note = 2'-O-methyladenosine
  source 1..21: mol_type = other RNA
gcagttggtttttgaatgtca

SEQ ID NO: 608 - RNA, 21 nt, synthetic construct
  modified_base 1: mod_base = gm
  modified_base 2: mod_base = cm
  modified_base 3: mod_base = OTHER; note = 2'-O-methyladenosine
  modified_base 4: mod_base = gm
  modified_base 5: mod_base = um
  modified_base 6: mod_base = um
  modified_base 7: mod_base = gm
  modified_base 8: mod_base = gm
  modified_base 9: mod_base = OTHER; note = 2'-fluorouridine
  modified_base 10: mod_base = OTHER; note = 2'-fluorouridine
  modified_base 11: mod_base = OTHER; note = 2'-fluorouridine
  modified_base 12: mod_base = um
  modified_base 13: mod_base = um
  modified_base 14: mod_base = gm
  modified_base 15: mod_base = OTHER; note = 2'-O-methyladenosine
  modified_base 16: mod_base = OTHER; note = 2'-O-methyladenosine
  modified_base 17: mod_base = um
  modified_base 18: mod_base = gm
  modified_base 19: mod_base = um
  modified_base 20: mod_base = cm
  modified_base 21: mod_base = OTHER; note = 2'-O-methyladenosine
  source 1..21: mol_type = other RNA
gcagttggtttttgaatgtca

SEQ ID NO: 609 - RNA, 21 nt, synthetic construct
  modified_base 1: mod_base = gm
  modified_base 2: mod_base = OTHER; note = 2'-O-methyladenosine
  modified_base 3: mod_base = um
  modified_base 4: mod_base = gm
  modified_base 5: mod_base = um
  modified_base 6: mod_base = gm
  modified_base 7: mod_base = gm
  modified_base 8: mod_base = OTHER; note = 2'-O-methyladenosine
  modified_base 9: mod_base = OTHER; note = 2'-fluoroguanosine
  modified_base 10: mod_base = um
  modified_base 11: mod_base = OTHER; note = 2'-fluoroguanosine
  modified_base 12: mod_base = cm
  modified_base 13: mod_base = OTHER; note = 2'-fluorocytidine
  modified_base 14: mod_base = OTHER; note = 2'-O-methyladenosine
  modified_base 15: mod_base = gm
  modified_base 16: mod_base = OTHER; note = 2'-O-methyladenosine
  modified_base 17: mod_base = um
  modified_base 18: mod_base = gm
  modified_base 19: mod_base = um
  modified_base 20: mod_base = um
  modified_base 21: mod_base = OTHER; note = 2'-O-methyladenosine
  source 1..21: mol_type = other RNA
gatgtggagtgccagatgtta

SEQ ID NO: 610 - RNA, 21 nt, synthetic construct
  modified_base 1: mod_base = gm
  modified_base 2: mod_base = cm
  modified_base 3: mod_base = OTHER; note = 2'-O-methyladenosine
  modified_base 4: mod_base = gm
  modified_base 5: mod_base = um
  modified_base 6: mod_base = gm
  modified_base 7: mod_base = OTHER; note = 2'-O-methyladenosine
  modified_base 8: mod_base = um
  modified_base 9: mod_base = OTHER; note = 2'-fluoroguanosine
  modified_base 10: mod_base = OTHER; note = 2'-fluorouridine
  modified_base 11: mod_base = OTHER; note = 2'-fluoroadenosine
  modified_base 12: mod_base = um
  modified_base 13: mod_base = cm
  modified_base 14: mod_base = cm
  modified_base 15: mod_base = OTHER; note = 2'-O-methyladenosine
  modified_base 16: mod_base = OTHER; note = 2'-O-methyladenosine
  modified_base 17: mod_base = cm
  modified_base 18: mod_base = cm
  modified_base 19: mod_base = um
  modified_base 20: mod_base = OTHER; note = 2'-O-methyladenosine
  modified_base 21: mod_base = OTHER; note = 2'-O-methyladenosine
  source 1..21: mol_type = other RNA
gcagtgatgtatccaacctaa

SEQ ID NO: 611 - RNA, 21 nt, synthetic construct
  modified_base 1: mod_base = cm
  modified_base 2: mod_base = OTHER; note = 2'-O-methyladenosine
  modified_base 3: mod_base = cm
  modified_base 4: mod_base = um
  modified_base 5: mod_base = cm
  modified_base 6: mod_base = cm
  modified_base 7: mod_base = um
  modified_base 8: mod_base = um
  modified_base 9: mod_base = OTHER; note = 2'-fluorouridine
  modified_base 10: mod_base = OTHER; note = 2'-fluorouridine
  modified_base 11: mod_base = OTHER; note = 2'-fluoroadenosine
  modified_base 12: mod_base = OTHER; note = 2'-O-methyladenosine
  modified_base 13: mod_base = gm
  modified_base 14: mod_base = gm
  modified_base 15: mod_base = OTHER; note = 2'-O-methyladenosine
  modified_base 16: mod_base = um
  modified_base 17: mod_base = OTHER; note = 2'-O-methyladenosine
  modified_base 18: mod_base = OTHER; note = 2'-O-methyladenosine
  modified_base 19: mod_base = OTHER; note = 2'-O-methyladenosine
  modified_base 20: mod_base = cm
  modified_base 21: mod_base = OTHER; note = 2'-O-methyladenosine
  source 1..21: mol_type = other RNA
cactccttttaaggataaaca

SEQ ID NO: 612 - RNA, 21 nt, synthetic construct
  modified_base 1: mod_base = gm
  modified_base 2: mod_base = cm
  modified_base 3: mod_base = OTHER; note = 2'-O-methyladenosine
  modified_base 4: mod_base = gm
  modified_base 5: mod_base = um
  modified_base 6: mod_base = um
  modified_base 7: mod_base = gm
  modified_base 8: mod_base = gm
  modified_base 9: mod_base = OTHER; note = 2'-fluorouridine
  modified_base 10: mod_base = um
  modified_base 11: mod_base = OTHER; note = 2'-fluorouridine
  modified_base 12: mod_base = um
  modified_base 13: mod_base = OTHER; note = 2'-fluorouridine
  modified_base 14: mod_base = gm
  modified_base 15: mod_base = OTHER; note = 2'-O-methyladenosine
  modified_base 16: mod_base = OTHER; note = 2'-O-methyladenosine
  modified_base 17: mod_base = um
  modified_base 18: mod_base = gm
  modified_base 19: mod_base = um
  modified_base 20: mod_base = cm
  modified_base 21: mod_base = OTHER; note = 2'-O-methyladenosine
  source 1..21: mol_type = other RNA
gcagttggtttttgaatgtca

SEQ ID NO: 613 - RNA, 21 nt, synthetic construct
  modified_base 1: mod_base = gm
  modified_base 1^2: mod_base = OTHER; note = phosphorothioate linkage
  modified_base 2: mod_base = cm
  modified_base 3: mod_base = OTHER; note = 2'-O-methyladenosine
  modified_base 4: mod_base = gm
  modified_base 5: mod_base = um
  modified_base 6: mod_base = gm
  modified_base 7: mod_base = OTHER; note = 2'-O-methyladenosine
  modified_base 8: mod_base = um
  modified_base 9: mod_base = OTHER; note = 2'-fluoroguanosine
  modified_base 10: mod_base = um
  modified_base 11: mod_base = OTHER; note = 2'-fluoroadenosine
  modified_base 12: mod_base = um
  modified_base 13: mod_base = OTHER; note = 2'-fluorocytidine
  modified_base 14: mod_base = cm
  modified_base 15: mod_base = OTHER; note = 2'-O-methyladenosine
  modified_base 16: mod_base = OTHER; note = 2'-O-methyladenosine
  modified_base 17: mod_base = cm
  modified_base 18: mod_base = cm
  modified_base 19: mod_base = um
  modified_base 20: mod_base = OTHER; note = 2'-O-methyladenosine
  modified_base 21: mod_base = um
  source 1..21: mol_type = other RNA
gcagtgatgtatccaacctat

SEQ ID NO: 614 - RNA, 21 nt, synthetic construct
  modified_base 1: mod_base = gm
  modified_base 1^2: mod_base = OTHER; note = phosphorothioate linkage
  modified_base 2: mod_base = cm
  modified_base 2^3: mod_base = OTHER; note = phosphorothioate linkage
  modified_base 3: mod_base = OTHER; note = 2'-O-methyladenosine
  modified_base 4: mod_base = gm
  modified_base 5: mod_base = um
  modified_base 6: mod_base = um
  modified_base 7: mod_base = gm
  modified_base 8: mod_base = gm
  modified_base 9: mod_base = OTHER; note = 2'-fluorouridine
  modified_base 10: mod_base = um
  modified_base 11: mod_base = OTHER; note = 2'-fluorouridine
  modified_base 12: mod_base = um
  modified_base 13: mod_base = OTHER; note = 2'-fluorouridine
  modified_base 14: mod_base = gm
  modified_base 15: mod_base = OTHER; note = 2'-O-methyladenosine
  modified_base 16: mod_base = OTHER; note = 2'-O-methyladenosine
  modified_base 17: mod_base = um
  modified_base 18: mod_base = gm
  modified_base 19: mod_base = um
  modified_base 20: mod_base = cm
  modified_base 20^21: mod_base = OTHER; note = phosphorothioate linkage
  modified_base 21: mod_base = um
  source 1..21: mol_type = other RNA
gcagttggtttttgaatgtct

SEQ ID NO: 615 - RNA, 20 nt, synthetic construct
  modified_base 1: mod_base = gm
  modified_base 1^2: mod_base = OTHER; note = phosphorothioate linkage
  modified_base 2: mod_base = cm
  modified_base 3: mod_base = gm
  modified_base 4: mod_base = um
  modified_base 5: mod_base = um
  modified_base 6: mod_base = gm
  modified_base 7: mod_base = gm
  modified_base 8: mod_base = OTHER; note = 2'-fluorouridine
  modified_base 9: mod_base = um
  modified_base 10: mod_base = OTHER; note = 2'-fluorouridine
  modified_base 11: mod_base = um
  modified_base 12: mod_base = OTHER; note = 2'-fluorouridine
  modified_base 13: mod_base = gm
  modified_base 14: mod_base = OTHER; note = 2'-O-methyladenosine
  modified_base 15: mod_base = OTHER; note = 2'-O-methyladenosine
  modified_base 16: mod_base = um
  modified_base 17: mod_base = gm
  modified_base 18: mod_base = um
  modified_base 19: mod_base = cm
  modified_base 20: mod_base = OTHER; note = 2'-O-methyladenosine
  source 1..20: mol_type = other RNA
gcgttggtttttgaatgtca

SEQ ID NO: 616 - RNA, 22 nt, synthetic construct
  modified_base 1: mod_base = gm
  modified_base 1^2: mod_base = OTHER; note = phosphorothioate linkage
  modified_base 2: mod_base = cm
  modified_base 3: mod_base = OTHER; note = 2'-O-methyladenosine
  modified_base 4: mod_base = gm
  modified_base 5: mod_base = um
  modified_base 6: mod_base = um
  modified_base 7: mod_base = gm
  modified_base 8: mod_base = gm
  modified_base 9: mod_base = gm
  modified_base 10: mod_base = OTHER; note = 2'-fluorouridine
  modified_base 11: mod_base = um
  modified_base 12: mod_base = OTHER; note = 2'-fluorouridine
  modified_base 13: mod_base = um
  modified_base 14: mod_base = OTHER; note = 2'-fluorouridine
  modified_base 15: mod_base = gm
  modified_base 16: mod_base = OTHER; note = 2'-O-methyladenosine
  modified_base 17: mod_base = OTHER; note = 2'-O-methyladenosine
  modified_base 18: mod_base = um
  modified_base 19: mod_base = gm
  modified_base 20: mod_base = um
  modified_base 21: mod_base = cm
  modified_base 22: mod_base = OTHER; note = 2'-O-methyladenosine
  source 1..22: mol_type = other RNA
gcagttgggtttttgaatgtca

SEQ ID NO: 617 - RNA, 21 nt, synthetic construct
  modified_base 1: mod_base = gm
  modified_base 1^2: mod_base = OTHER; note = phosphorothioate linkage
  modified_base 2: mod_base = cm
  modified_base 3: mod_base = OTHER; note = 2'-O-methyladenosine
  modified_base 4: mod_base = gm
  modified_base 5: mod_base = um
  modified_base 6: mod_base = um
  modified_base 7: mod_base = gm
  modified_base 8: mod_base = gm
  modified_base 9: mod_base = OTHER; note = 2'-fluorouridine
  modified_base 10: mod_base = um
  modified_base 11: mod_base = OTHER; note = 2'-fluorouridine
  modified_base 12: mod_base = um
  modified_base 13: mod_base = OTHER; note = 2'-fluorouridine
  modified_base 14: mod_base = gm
  modified_base 15: mod_base = OTHER; note = 2'-O-methyladenosine
  modified_base 16: mod_base = OTHER; note = 2'-O-methyladenosine
  modified_base 17: mod_base = um
  modified_base 18: mod_base = gm
  modified_base 19: mod_base = um
  modified_base 20: mod_base = cm
  modified_base 21: mod_base = OTHER; note = 2'-O-methyladenosine
  source 1..21: mol_type = other RNA
gcagttggtttttgaatgtca

SEQ ID NO: 618 - RNA, 21 nt, synthetic construct
  modified_base 1: mod_base = gm
  modified_base 1^2: mod_base = OTHER; note = phosphorothioate linkage
  modified_base 2: mod_base = OTHER; note = 2'-O-methyladenosine
  modified_base 3: mod_base = um
  modified_base 4: mod_base = gm
  modified_base 5: mod_base = um
  modified_base 6: mod_base = gm
  modified_base 7: mod_base = gm
  modified_base 8: mod_base = OTHER; note = 2'-O-methyladenosine
  modified_base 9: mod_base = OTHER; note = 2'-fluoroguanosine
  modified_base 10: mod_base = OTHER; note = 2'-fluorouridine
  modified_base 11: mod_base = OTHER; note = 2'-fluoroguanosine
  modified_base 12: mod_base = cm
  modified_base 13: mod_base = cm
  modified_base 14: mod_base = OTHER; note = 2'-O-methyladenosine
  modified_base 15: mod_base = gm
  modified_base 16: mod_base = OTHER; note = 2'-O-methyladenosine
  modified_base 17: mod_base = um
  modified_base 18: mod_base = gm
  modified_base 19: mod_base = um
  modified_base 20: mod_base = um
  modified_base 21: mod_base = OTHER; note = 2'-O-methyladenosine
  source 1..21: mol_type = other RNA
gatgtggagtgccagatgtta

SEQ ID NO: 619 - RNA, 21 nt, synthetic construct
  modified_base 1: mod_base = gm
  modified_base 1^2: mod_base = OTHER; note = phosphorothioate linkage
  modified_base 2: mod_base = OTHER; note = 2'-O-methyladenosine
  modified_base 3: mod_base = um
  modified_base 4: mod_base = gm
  modified_base 5: mod_base = um
  modified_base 6: mod_base = gm
  modified_base 7: mod_base = gm
  modified_base 8: mod_base = OTHER; note = 2'-O-methyladenosine
  modified_base 9: mod_base = OTHER; note = 2'-fluoroguanosine
  modified_base 10: mod_base = um
  modified_base 11: mod_base = OTHER; note = 2'-fluoroguanosine
  modified_base 12: mod_base = cm
  modified_base 13: mod_base = OTHER; note = 2'-fluorocytidine
  modified_base 14: mod_base = OTHER; note = 2'-O-methyladenosine
  modified_base 15: mod_base = gm
  modified_base 16: mod_base = OTHER; note = 2'-O-methyladenosine
  modified_base 17: mod_base = um
  modified_base 18: mod_base = gm
  modified_base 19: mod_base = um
  modified_base 20: mod_base = um
  modified_base 21: mod_base = OTHER; note = 2'-O-methyladenosine
  source 1..21: mol_type = other RNA
gatgtggagtgccagatgtta

SEQ ID NO: 620 - RNA, 21 nt, synthetic construct
  modified_base 1: mod_base = gm
  modified_base 1^2: mod_base = OTHER; note = phosphorothioate linkage
  modified_base 2: mod_base = cm
  modified_base 3: mod_base = OTHER; note = 2'-O-methyladenosine
  modified_base 4: mod_base = gm
  modified_base 5: mod_base = um
  modified_base 6: mod_base = um
  modified_base 7: mod_base = gm
  modified_base 8: mod_base = gm
  modified_base 9: mod_base = OTHER; note = 2'-fluorouridine
  modified_base 10: mod_base = um
  modified_base 11: mod_base = OTHER; note = 2'-fluorouridine
  modified_base 12: mod_base = um
  modified_base 13: mod_base = OTHER; note = 2'-fluorouridine
  modified_base 14: mod_base = gm
  modified_base 15: mod_base = OTHER; note = 2'-O-methyladenosine
  modified_base 16: mod_base = OTHER; note = 2'-O-methyladenosine
  modified_base 17: mod_base = um
  modified_base 18: mod_base = gm
  modified_base 19: mod_base = um
  modified_base 20: mod_base = cm
  modified_base 21: mod_base = um
  source 1..21: mol_type = other RNA
gcagttggtttttgaatgtct

SEQ ID NO: 621 - RNA, 21 nt, synthetic construct
  modified_base 1: mod_base = gm
  modified_base 1^2: mod_base = OTHER; note = phosphorothioate linkage
  modified_base 2: mod_base = cm
  modified_base 3: mod_base = OTHER; note = 2'-O-methyladenosine
  modified_base 4: mod_base = gm
  modified_base 5: mod_base = um
  modified_base 6: mod_base = um
  modified_base 7: mod_base = gm
  modified_base 8: mod_base = gm
  modified_base 9: mod_base = OTHER; note = 2'-fluorouridine
  modified_base 10: mod_base = OTHER; note = 2'-fluorouridine
  modified_base 11: mod_base = OTHER; note = 2'-fluorouridine
  modified_base 12: mod_base = um
  modified_base 13: mod_base = um
  modified_base 14: mod_base = gm
  modified_base 15: mod_base = OTHER; note = 2'-O-methyladenosine
  modified_base 16: mod_base = OTHER; note = 2'-O-methyladenosine
  modified_base 17: mod_base = um
  modified_base 18: mod_base = gm
  modified_base 19: mod_base = um
  modified_base 20: mod_base = cm
  modified_base 21: mod_base = um
  source 1..21: mol_type = other RNA
gcagttggtttttgaatgtct

SEQ ID NO: 622 - RNA, 21 nt, synthetic construct
  modified_base 1: mod_base = cm
  modified_base 1^2: mod_base = OTHER; note = phosphorothioate linkage
  modified_base 2: mod_base = OTHER; note = 2'-O-methyladenosine
  modified_base 3: mod_base = gm
  modified_base 4: mod_base = um
  modified_base 5: mod_base = gm
  modified_base 6: mod_base = gm
  modified_base 7: mod_base = OTHER; note = 2'-O-methyladenosine
  modified_base 8: mod_base = um
  modified_base 9: mod_base = OTHER; note = 2'-fluorocytidine
  modified_base 10: mod_base = gm
  modified_base 11: mod_base = OTHER; note = 2'-fluoroadenosine
  modified_base 12: mod_base = um
  modified_base 13: mod_base = OTHER; note = 2'-fluorouridine
  modified_base 14: mod_base = OTHER; note = 2'-O-methyladenosine
  modified_base 15: mod_base = gm
  modified_base 16: mod_base = um
  modified_base 17: mod_base = gm
  modified_base 18: mod_base = um
  modified_base 19: mod_base = cm
  modified_base 20: mod_base = OTHER; note = 2'-O-methyladenosine
  modified_base 21: mod_base = OTHER; note = 2'-O-methyladenosine
  source 1..21: mol_type = other RNA
cagtggatcgattagtgtcaa

SEQ ID NO: 623 - RNA, 21 nt, synthetic construct
  modified_base 1: mod_base = cm
  modified_base 1^2: mod_base = OTHER; note = phosphorothioate linkage
  modified_base 2: mod_base = OTHER; note = 2'-O-methyladenosine
  modified_base 3: mod_base = gm
  modified_base 4: mod_base = um
  modified_base 5: mod_base = gm
  modified_base 6: mod_base = gm
  modified_base 7: mod_base = OTHER; note = 2'-O-methyladenosine
  modified_base 8: mod_base = um
  modified_base 9: mod_base = OTHER; note = 2'-fluorocytidine
  modified_base 10: mod_base = gm
  modified_base 11: mod_base = OTHER; note = 2'-fluoroadenosine
  modified_base 12: mod_base = um
  modified_base 13: mod_base = OTHER; note = 2'-fluorouridine
  modified_base 14: mod_base = OTHER; note = 2'-O-methyladenosine
  modified_base 15: mod_base = gm
  modified_base 16: mod_base = um
  modified_base 17: mod_base = OTHER; note = 2-O-methylinosine
  modified_base 18: mod_base = um
  modified_base 19: mod_base = cm
  modified_base 20: mod_base = OTHER; note = 2'-O-methyladenosine
  modified_base 21: mod_base = OTHER; note = 2'-O-methyladenosine
  source 1..21: mol_type = other RNA
cagtggatcgattagtntcaa

SEQ ID NO: 624 - RNA, 21 nt, synthetic construct
  modified_base 1: mod_base = gm
  modified_base 1^2: mod_base = OTHER; note = phosphorothioate linkage
  modified_base 2: mod_base = cm
  modified_base 3: mod_base = OTHER; note = 2'-O-methyladenosine
  modified_base 4: mod_base = gm
  modified_base 5: mod_base = um
  modified_base 6: mod_base = gm
  modified_base 7: mod_base = OTHER; note = 2'-O-methyladenosine
  modified_base 8: mod_base = um
  modified_base 9: mod_base = OTHER; note = 2'-fluoroguanosine
  modified_base 10: mod_base = um
  modified_base 11: mod_base = OTHER; note = 2'-fluoroadenosine
  modified_base 12: mod_base = um
  modified_base 13: mod_base = OTHER; note = 2'-fluorocytidine
  modified_base 14: mod_base = cm
  modified_base 15: mod_base = OTHER; note = 2'-O-methyladenosine
  modified_base 16: mod_base = OTHER; note = 2'-O-methyladenosine
  modified_base 17: mod_base = cm
  modified_base 18: mod_base = cm
  modified_base 19: mod_base = um
  modified_base 20: mod_base = OTHER; note = 2'-O-methyladenosine
  modified_base 21: mod_base = um
  source 1..21: mol_type = other RNA
gcagtgatgtatccaacctat

SEQ ID NO: 625 - RNA, 20 nt, synthetic construct
  modified_base 1: mod_base = gm
  modified_base 1^2: mod_base = OTHER; note = phosphorothioate linkage
  modified_base 2: mod_base = cm
  modified_base 3: mod_base = gm
  modified_base 4: mod_base = um
  modified_base 5: mod_base = um
  modified_base 6: mod_base = gm
  modified_base 7: mod_base = gm
  modified_base 8: mod_base = OTHER; note = 2'-fluorouridine
  modified_base 9: mod_base = um
  modified_base 10: mod_base = OTHER; note = 2'-fluorouridine
  modified_base 11: mod_base = um
  modified_base 12: mod_base = OTHER; note = 2'-fluorouridine
  modified_base 13: mod_base = gm
  modified_base 14: mod_base = OTHER; note = 2'-O-methyladenosine
  modified_base 15: mod_base = OTHER; note = 2'-O-methyladenosine
  modified_base 16: mod_base = um
  modified_base 17: mod_base = gm
  modified_base 18: mod_base = um
  modified_base 19: mod_base = cm
  modified_base 20: mod_base = OTHER; note = 2'-O-methyladenosine
  source 1..20: mol_type = other RNA
gcgttggtttttgaatgtca

SEQ ID NO: 626 - RNA, 22 nt, synthetic construct
  modified_base 1: mod_base = gm
  modified_base 1^2: mod_base = OTHER; note = phosphorothioate linkage
  modified_base 2: mod_base = cm
  modified_base 3: mod_base = OTHER; note = 2'-O-methyladenosine
  modified_base 4: mod_base = gm
  modified_base 5: mod_base = um
  modified_base 6: mod_base = um
  modified_base 7: mod_base = gm
  modified_base 8: mod_base = gm
  modified_base 9: mod_base = gm
  modified_base 10: mod_base = OTHER; note = 2'-fluorouridine
  modified_base 11: mod_base = um
  modified_base 12: mod_base = OTHER; note = 2'-fluorouridine
  modified_base 13: mod_base = um
  modified_base 14: mod_base = OTHER; note = 2'-fluorouridine
  modified_base 15: mod_base = gm
  modified_base 16: mod_base = OTHER; note = 2'-O-methyladenosine
  modified_base 17: mod_base = OTHER; note = 2'-O-methyladenosine
  modified_base 18: mod_base = um
  modified_base 19: mod_base = gm
  modified_base 20: mod_base = um
  modified_base 21: mod_base = cm
  modified_base 22: mod_base = OTHER; note = 2'-O-methyladenosine
  source 1..22: mol_type = other RNA
gcagttgggtttttgaatgtca

SEQ ID NO: 627 - RNA, 21 nt, synthetic construct
  modified_base 1: mod_base = gm
  modified_base 1^2: mod_base = OTHER; note = phosphorothioate linkage
  modified_base 2: mod_base = cm
  modified_base 3: mod_base = OTHER; note = 2'-O-methyladenosine
  modified_base 4: mod_base = gm
  modified_base 5: mod_base = um
  modified_base 6: mod_base = um
  modified_base 7: mod_base = gm
  modified_base 8: mod_base = gm
  modified_base 9: mod_base = OTHER; note = 2'-fluorouridine
  modified_base 10: mod_base = um
  modified_base 11: mod_base = OTHER; note = 2'-fluorouridine
  modified_base 12: mod_base = um
  modified_base 13: mod_base = OTHER; note = 2'-fluorouridine
  modified_base 14: mod_base = gm
  modified_base 15: mod_base = OTHER; note = 2'-O-methyladenosine
  modified_base 16: mod_base = OTHER; note = 2'-O-methyladenosine
  modified_base 17: mod_base = um
  modified_base 18: mod_base = gm
  modified_base 19: mod_base = um
  modified_base 20: mod_base = cm
  modified_base 21: mod_base = OTHER; note = 2'-O-methyladenosine
  source 1..21: mol_type = other RNA
gcagttggtttttgaatgtca

SEQ ID NO: 628 - RNA, 21 nt, synthetic construct
  modified_base 1: mod_base = gm
  modified_base 1^2: mod_base = OTHER; note = phosphorothioate linkage
  modified_base 2: mod_base = cm
  modified_base 3: mod_base = OTHER; note = 2'-O-methyladenosine
  modified_base 4: mod_base = gm
  modified_base 5: mod_base = um
  modified_base 6: mod_base = um
  modified_base 7: mod_base = gm
  modified_base 8: mod_base = gm
  modified_base 9: mod_base = OTHER; note = 2'-fluorouridine
  modified_base 10: mod_base = um
  modified_base 11: mod_base = OTHER; note = 2'-fluorouridine
  modified_base 12: mod_base = um
  modified_base 13: mod_base = OTHER; note = 2'-fluorouridine
  modified_base 14: mod_base = gm
  modified_base 15: mod_base = OTHER; note = 2'-O-methyladenosine
  modified_base 16: mod_base = OTHER; note = 2'-O-methyladenosine
  modified_base 17: mod_base = um
  modified_base 18: mod_base = gm
  modified_base 19: mod_base = um
  modified_base 20: mod_base = cm
  modified_base 21: mod_base = OTHER; note = 2'-O-methyladenosine
  source 1..21: mol_type = other RNA
gcagttggtttttgaatgtca

SEQ ID NO: 629 - RNA, 21 nt, synthetic construct
  source 1..21: mol_type = other RNA
aacatctggcactccacatct

SEQ ID NO: 630 - RNA, 21 nt, synthetic construct
  source 1..21: mol_type = other RNA
aacatctggcactccacatcg

SEQ ID NO: 631 - RNA, 21 nt, synthetic construct
  source 1..21: mol_type = other RNA
tcaacatctggcactccacat

SEQ ID NO: 632 - RNA, 21 nt, synthetic construct
  source 1..21: mol_type = other RNA
tcaacatctggcactccacag

SEQ ID NO: 633 - RNA, 21 nt, synthetic construct
  source 1..21: mol_type = other RNA
tgcaacatctggcactccaca

SEQ ID NO: 634 - RNA, 21 nt, synthetic construct
  source 1..21: mol_type = other RNA
tgcaacatctggcactccacg

SEQ ID NO: 635 - RNA, 21 nt, synthetic construct
  source 1..21: mol_type = other RNA
tctgcaacatctggcactcca

SEQ ID NO: 636 - RNA, 21 nt, synthetic construct
  source 1..21: mol_type = other RNA
tctgcaacatctggcactccg

SEQ ID NO: 637 - RNA, 21 nt, synthetic construct
  source 1..21: mol_type = other RNA
ttctgcaacatctggcactcc

SEQ ID NO: 638 - RNA, 21 nt, synthetic construct
  source 1..21: mol_type = other RNA
attctgcaacatctggcactc

SEQ ID NO: 639 - RNA, 21 nt, synthetic construct
  source 1..21: mol_type = other RNA
tattctgcaacatctggcact

SEQ ID NO: 640 - RNA, 21 nt, synthetic construct
  source 1..21: mol_type = other RNA
tattctgcaacatctggcacg

SEQ ID NO: 641 - RNA, 21 nt, synthetic construct
  source 1..21: mol_type = other RNA
tttcctggcccatcaaatggg

SEQ ID NO: 642 - RNA, 21 nt, synthetic construct
  source 1..21: mol_type = other RNA
tgtgtttcctggcccatcaag

SEQ ID NO: 643 - RNA, 21 nt, synthetic construct
  source 1..21: mol_type = other RNA
tcttctttgttttagagtcgt

SEQ ID NO: 644 - RNA, 21 nt, synthetic construct
  source 1..21: mol_type = other RNA
aagaacttctgcatttccctc

SEQ ID NO: 645 - RNA, 21 nt, synthetic construct
  source 1..21: mol_type = other RNA
ttgatctactaagaaccgagg

SEQ ID NO: 646 - RNA, 21 nt, synthetic construct
  source 1..21: mol_type = other RNA
acaaacaggaagttcactcct

SEQ ID NO: 647 - RNA, 21 nt, synthetic construct
  source 1..21: mol_type = other RNA
tacagtacaaggaagaaagga

SEQ ID NO: 648 - RNA, 21 nt, synthetic construct
  source 1..21: mol_type = other RNA
tgacatttattgctggtgtct

SEQ ID NO: 649 - RNA, 21 nt, synthetic construct
  source 1..21: mol_type = other RNA
tgacatttattgctggtgtcg

SEQ ID NO: 650 - RNA, 21 nt, synthetic construct
  source 1..21: mol_type = other RNA
tgacatttattgctgatgtcg

SEQ ID NO: 651 - RNA, 21 nt, synthetic construct
  source 1..21: mol_type = other RNA
tttgagatagtcctgagcctg

SEQ ID NO: 652 - RNA, 21 nt, synthetic construct
  source 1..21: mol_type = other RNA
agagataaaatctcttgagac

SEQ ID NO: 653 - RNA, 21 nt, synthetic construct
  source 1..21: mol_type = other RNA
tcatagagataaaatctcttg

SEQ ID NO: 654 - RNA, 21 nt, synthetic construct
  source 1..21: mol_type = other RNA
tagtcatagagataaaatctc

SEQ ID NO: 655 - RNA, 21 nt, synthetic construct
  source 1..21: mol_type = other RNA
taacatctggcactccacatc

SEQ ID NO: 656 - RNA, 21 nt, synthetic construct
  source 1..21: mol_type = other RNA
tagtattctgcaacatctggc

SEQ ID NO: 657 - RNA, 21 nt, synthetic construct
  source 1..21: mol_type = other RNA
aatagtgagtattctgcaacc

SEQ ID NO: 658 - RNA, 21 nt, synthetic construct
  source 1..21: mol_type = other RNA
aaatagtgagtattctgcaac

SEQ ID NO: 659 - RNA, 21 nt, synthetic construct
  source 1..21: mol_type = other RNA
tactaatcgatccactgtaac

SEQ ID NO: 660 - RNA, 21 nt, synthetic construct
  source 1..21: mol_type = other RNA
acactaatcgatccactgtac

SEQ ID NO: 661 - RNA, 21 nt, synthetic construct
  source 1..21: mol_type = other RNA
ttgacactaatcgatccactg

SEQ ID NO: 662 - RNA, 21 nt, synthetic construct
  source 1..21: mol_type = other RNA
tcatcgaagtgagcatctcct

SEQ ID NO: 663 - RNA, 21 nt, synthetic construct
  source 1..21: mol_type = other RNA
tagcatacaggaagttaatcc

SEQ ID NO: 664 - RNA, 21 nt, synthetic construct
  source 1..21: mol_type = other RNA
ataggttggatacatcactgc

SEQ ID NO: 665 - RNA, 21 nt, synthetic construct
  source 1..21: mol_type = other RNA
atttccataggttggatacac

SEQ ID NO: 666 - RNA, 21 nt, synthetic construct
  source 1..21: mol_type = other RNA
tcctttaatatcatcctggga

SEQ ID NO: 667 - RNA, 21 nt, synthetic construct
  source 1..21: mol_type = other RNA
tatagtttctgaatgcctttc

SEQ ID NO: 668 - RNA, 21 nt, synthetic construct
  source 1..21: mol_type = other RNA
tcaattctgattgtgcaacac

SEQ ID NO: 669 - RNA, 21 nt, synthetic construct
  source 1..21: mol_type = other RNA
atcaattctgattgtgcaacc

SEQ ID NO: 670 - RNA, 21 nt, synthetic construct
  source 1..21: mol_type = other RNA
tgcttatcaattctgattgtg

SEQ ID NO: 671 - RNA, 21 nt, synthetic construct
  source 1..21: mol_type = other RNA
ttgcttatcaattctgattgc

SEQ ID NO: 672 - RNA, 21 nt, synthetic construct
  source 1..21: mol_type = other RNA
tgcaataaaaaagggtgacac

SEQ ID NO: 673 - RNA, 21 nt, synthetic construct
  source 1..21: mol_type = other RNA
acattcaaaaaccaactgcac

SEQ ID NO: 674 - RNA, 21 nt, synthetic construct
  source 1..21: mol_type = other RNA
agacattcaaaaaccaactgc

SEQ ID NO: 675 - RNA, 21 nt, synthetic construct
  source 1..21: mol_type = other RNA
aagacattcaaaaaccaactg

SEQ ID NO: 676 - RNA, 21 nt, synthetic construct
  source 1..21: mol_type = other RNA
agtttatccttaaaaggagtg

SEQ ID NO: 677 - RNA, 21 nt, synthetic construct
  source 1..21: mol_type = other RNA
tcaattctgattgtgcaacag

SEQ ID NO: 678 - RNA, 21 nt, synthetic construct
  source 1..21: mol_type = other RNA
agtttatccttaaaaggagtc

SEQ ID NO: 679 - RNA, 21 nt, synthetic construct
  source 1..21: mol_type = other RNA
tgacattcaaaaaccaactgc

SEQ ID NO: 680 - RNA, 21 nt, synthetic construct
  source 1..21: mol_type = other RNA
ttaggttggatacatcactgc

SEQ ID NO: 681 - RNA, 21 nt, synthetic construct
  source 1..21: mol_type = other RNA
tgtttatccttaaaaggagtg

SEQ ID NO: 682 - RNA, 21 nt, synthetic construct
  source 1..21: mol_type = other RNA
agatgtggagtgccagatgtt

SEQ ID NO: 683 - RNA, 21 nt, synthetic construct
  source 1..21: mol_type = other RNA
cgatgtggagtgccagatgtt

SEQ ID NO: 684 - RNA, 21 nt, synthetic construct
  source 1..21: mol_type = other RNA
atgtggagtgccagatgttga

SEQ ID NO: 685 - RNA, 21 nt, synthetic construct
  source 1..21: mol_type = other RNA
ctgtggagtgccagatgttga

SEQ ID NO: 686 - RNA, 21 nt, synthetic construct
  source 1..21: mol_type = other RNA
tgtggagtgccagatgttgca

SEQ ID NO: 687 - RNA, 21 nt, synthetic construct
  source 1..21: mol_type = other RNA
cgtggagtgccagatgttgca

SEQ ID NO: 688 - RNA, 21 nt, synthetic construct
  source 1..21: mol_type = other RNA
tggagtgccagatgttgcaga

SEQ ID NO: 689 - RNA, 21 nt, synthetic construct
  source 1..21: mol_type = other RNA
cggagtgccagatgttgcaga

SEQ ID NO: 690 - RNA, 21 nt, synthetic construct
  source 1..21: mol_type = other RNA
ggagtgccagatgttgcagaa

SEQ ID NO: 691 - RNA, 21 nt, synthetic construct
  source 1..21: mol_type = other RNA
gagtgccagatgttgcagaat

SEQ ID NO: 692 - RNA, 21 nt, synthetic construct
  source 1..21: mol_type = other RNA
agtgccagatgttgcagaata

SEQ ID NO: 693 - RNA, 21 nt, synthetic construct
  source 1..21: mol_type = other RNA
cgtgccagatgttgcagaata

SEQ ID NO: 694 - RNA, 21 nt, synthetic construct
  source 1..21: mol_type = other RNA
cccatttgatgggccaggaaa

SEQ ID NO: 695 - RNA, 21 nt, synthetic construct
  source 1..21: mol_type = other RNA
cttgatgggccaggaaacaca

SEQ ID NO: 696 - RNA, 21 nt, synthetic construct
  source 1..21: mol_type = other RNA
caggctcaggactatctcaaa

SEQ ID NO: 697 - RNA, 21 nt, synthetic construct
  source 1..21: mol_type = other RNA
gtctcaagagattttatctct

SEQ ID NO: 698 - RNA, 21 nt, synthetic construct
  source 1..21: mol_type = other RNA
caagagattttatctctatga

SEQ ID NO: 699 - RNA, 21 nt, synthetic construct
  source 1..21: mol_type = other RNA
gagattttatctctatgacta

SEQ ID NO: 700 - RNA, 21 nt, synthetic construct
  source 1..21: mol_type = other RNA
gatgtggagtgccagatgtta

SEQ ID NO: 701 - RNA, 21 nt, synthetic construct
  modified_base 16: mod_base = i
  source 1..21: mol_type = other RNA
ggagtgccagatgttncagaa

SEQ ID NO: 702 - RNA, 21 nt, synthetic construct
  source 1..21: mol_type = other RNA
gccagatgttgcagaatacta

SEQ ID NO: 703 - RNA, 21 nt, synthetic construct
  source 1..21: mol_type = other RNA
ggttgcagaatactcactatt

SEQ ID NO: 704 - RNA, 21 nt, synthetic construct
  source 1..21: mol_type = other RNA
gttgcagaatactcactattt

SEQ ID NO: 705 - RNA, 21 nt, synthetic construct
  source 1..21: mol_type = other RNA
gttacagtggatcgattagta

SEQ ID NO: 706 - RNA, 21 nt, synthetic construct
  modified_base 18: mod_base = i
  source 1..21: mol_type = other RNA
gtacagtggatcgattantgt

SEQ ID NO: 707 - RNA, 21 nt, synthetic construct
  modified_base 17: mod_base = i
  source 1..21: mol_type = other RNA
cagtggatcgattagtntcaa

SEQ ID NO: 708 - RNA, 21 nt, synthetic construct
  modified_base 17: mod_base = i
  source 1..21: mol_type = other RNA
aggagatgctcacttcnatga

SEQ ID NO: 709 - RNA, 21 nt, synthetic construct
  source 1..21: mol_type = other RNA
ggattaacttcctgtatgcta

SEQ ID NO: 710 - RNA, 21 nt, synthetic construct
  source 1..21: mol_type = other RNA
gcagtgatgtatccaacctat

SEQ ID NO: 711 - RNA, 21 nt, synthetic construct
  source 1..21: mol_type = other RNA
gtgtatccaacctatggaaat

SEQ ID NO: 712 - RNA, 21 nt, synthetic construct
  source 1..21: mol_type = other RNA
tcccaggatgatattaaagga

SEQ ID NO: 713 - RNA, 21 nt, synthetic construct
  source 1..21: mol_type = other RNA
gaaaggcattcagaaactata

SEQ ID NO: 714 - RNA, 21 nt, synthetic construct
  source 1..21: mol_type = other RNA
gtgttgcacaatcagaattga

SEQ ID NO: 715 - RNA, 21 nt, synthetic construct
  source 1..21: mol_type = other RNA
ggttgcacaatcagaattgat

SEQ ID NO: 716 - RNA, 21 nt, synthetic construct
  source 1..21: mol_type = other RNA
cacaatcagaattgataagca

SEQ ID NO: 717 - RNA, 21 nt, synthetic construct
  source 1..21: mol_type = other RNA
gcaatcagaattgataagcaa

SEQ ID NO: 718 - RNA, 21 nt, synthetic construct
  source 1..21: mol_type = other RNA
gtgtcacccttttttattgca

SEQ ID NO: 719 - RNA, 21 nt, synthetic construct
  source 1..21: mol_type = other RNA
gtgcagttggtttttgaatgt

SEQ ID NO: 720 - RNA, 21 nt, synthetic construct
  source 1..21: mol_type = other RNA
gcagttggtttttgaatgtct

SEQ ID NO: 721 - RNA, 21 nt, synthetic construct
  source 1..21: mol_type = other RNA
cagttggtttttgaatgtctt

SEQ ID NO: 722 - RNA, 21 nt, synthetic construct
  source 1..21: mol_type = other RNA
cactccttttaaggataaact

SEQ ID NO: 723 - RNA, 21 nt, synthetic construct
  source 1..21: mol_type = other RNA
ctgttgcacaatcagaattga

SEQ ID NO: 724 - RNA, 21 nt, synthetic construct
  source 1..21: mol_type = other RNA
cagtggatcgattagtgtcaa

SEQ ID NO: 725 - RNA, 21 nt, synthetic construct
  source 1..21: mol_type = other RNA
gactccttttaaggataaact

SEQ ID NO: 726 - RNA, 21 nt, synthetic construct
  source 1..21: mol_type = other RNA
gcagttggtttttgaatgtca

SEQ ID NO: 727 - RNA, 21 nt, synthetic construct
  source 1..21: mol_type = other RNA
gcagtgatgtatccaacctaa

SEQ ID NO: 728 - RNA, 21 nt, synthetic construct
  source 1..21: mol_type = other RNA
cactccttttaaggataaaca

SEQ ID NO: 729 - RNA, 20 nt, synthetic construct
  source 1..20: mol_type = other RNA
gcgttggtttttgaatgtca

SEQ ID NO: 730 - RNA, 22 nt, synthetic construct
  source 1..22: mol_type = other RNA
gcagttgggtttttgaatgtca
